(19) United States
(12) Patent Application Publication
(10) Pub. No.: US 2026/0022366 A1
(43) Pub. Date: Jan. 22, 2026

(54) ENGINEERED NITROALDOLASES

(71) Applicant: Codexis, Inc., Redwood City, CA (US)

(72) Inventors: Oscar Alvizo, Fremont, CA (US); Scott J. Novick, Palo Alto, CA (US); Nandhitha Subramanian, Milton Keynes (GB); Thierry Schlama, Basel (CH)

(21) Appl. No.: 18/868,597

(22) PCT Filed: Jun. 6, 2023
(86) PCT No.: PCT/US2023/067997

§ 371 Date: Nov. 22, 2024

Related U.S. Application Data
(60) Provisional application No. 63/350,128, filed on Jun. 8, 2022.

(51) Int. Cl. C12N 9/88; C12N 15/70; C12P 13/00; C12R 1/19; C40B 40/10

(52) U.S. Cl. CPC C12N 9/88; C12N 15/70; C12P 13/00; C40B 40/10; C12R 2001/19; C12Y 401/02047

(57) ABSTRACT

The present invention provides engineered nitroaldolase polypeptides useful for the production of the β-nitro alcohols, as well as polynucleotides, compositions, and methods utilizing these engineered polypeptides.

[0001] The present application claims priority to U.S. Prov. Pat. Appln. Ser. No. 63/350,128, filed Jun. 8, 2022, which is hereby incorporated by reference in its entirety for all purposes.

### TECHNICAL FIELD

[0002] The present invention provides engineered nitroaldolase polypeptides useful for the production of β-nitro alcohols and tertiary amino alcohols, as well as compositions and methods utilizing these engineered polypeptides.

### REFERENCE TO SEQUENCE LISTING, TABLE OR COMPUTER PROGRAM

[0003] The official copy of the Sequence Listing is submitted concurrently with the specification as an XML file, with a file name of “CX2-230WO1 ST26.xml”, a creation date of Jun. 1, 2023, and a size of 2,633,728 bytes. The Sequence Listing filed is part of the specification and is incorporated in its entirety by reference herein.

### BACKGROUND

[0004] Chiral tertiary amino alcohols are important building blocks in the pharmaceutical industry. In particular, chiral tertiary amino alcohols are intermediates for compounds used in the treatment of cystic fibrosis and chronic obstructive pulmonary disease (COPD). However, traditional chemical synthesis methods for chiral tertiary amino alcohols can have drawbacks, such as requiring long synthetic routes, utilizing expensive substrates, providing poor yields and selectivity, and generating toxic by-products.

[0005] Therefore, more cost effective and environmentally sensitive biocatalytic synthesis routes are of interest to efficiently produce these compounds. However, only a few biocatalytic routes are known to produce chiral tertiary amino alcohol compounds.

[0006] One approach may involve generation of chiral β-amino alcohols via a β-hydroxy-α-amino acid intermediate using a two-enzyme cascade (Duckers et al. Appl Microbiol Biotechnol, 2010, 88:409-424). However, in all reported literature examples, this route is limited to producing chiral secondary alcohols and not the desired chiral tertiary alcohol.

[0007] Another potential route is the enzyme-catalyzed enantioselective addition of nitromethane to trifluoroacetone to form a chiral tertiary nitroaldol product, followed by chemical reduction to the chiral amino alcohol. This is not a known natural reaction. However, there is some literature precedent of hydroxynitrile lyases and other enzymes catalyzing this reaction.

[0008] These include an (R)-selective nitroaldolase reaction catalyzed by hydroxynitrile lyases from Acidobacterium capsulatum and Granulicella tundricula (M. Bekerle-Bogner, M. Gruber-Khadjawi, H. Wiltsche, R. Wiedner, H. Schwab, K. Steiner, ChemCatChem 2016, 8, 2214). Henry (nitroaldol) reactions have also been reported using an hydroxynitrile lyase from Hevea brasiliensis (Gruber-Khadjawi, M., Purkarthofer, T., Skranc, W. and Griengl, H. (2007) Adv. Synth. Catal., 349: 1445-1450) and a transglutaminase from Streptorerticillium griseoverticillatum (Tang R., Guan Z., He Y., Zhu W., J of Molec Catal B: Enzymatic, 63: 1-2, 2010, 62-67). Other examples of similar enzyme-catalyzed reactions are known in the literature.

[0009] However, no current reports demonstrate activity of a hydroxynitrile lyase/nitroaldolase on a ketone substrate, and no current reports demonstrate highly (S)-selective activity of a hydroxynitrile lyase as a nitroaldolase. A nitroaldolase with (S)-selective activity on ketones would enable the synthesis of a range useful chiral amino alcohol compounds.

### SUMMARY

[0010] The present invention provides novel biocatalysts and associated methods of use for the synthesis β-nitro alcohols and tertiary amino alcohols. The nitroaldolase biocatalysts of the present disclosure are engineered variants of a polypeptide (SEQ ID NO: 2) encoded by a homolog gene from Baliospermum montanum (SEQ ID NO: 1). These engineered polypeptides are capable of catalyzing the conversion of trifluoroacetone and nitromethane to a β-nitro alcohol, which is a precursor to a tertiary amino alcohol product.

[0011] The present invention provides an engineered polypeptide comprising an amino acid sequence with at least 80%, 85%, 90%, 91%, 92%, 93%, 94%, 95%, 96%, 97%, 98%, 99% sequence identity to a reference sequence of SEQ ID NO: 2, comprising at least one substitution or one substitution set at one or more positions selected from 7/9, 7/9/33/68/72/158, 7/9/33/72/175/197/230, 7/9/33/72/230, 7/9/68/72/197, 7/9/158/175, 7/9/175, 7/9/197, 7/33, 7/68/72/175, 7/72, 7/72/97/175/230, 9, 9/11/33/72/197/230, 9/33/68/158/197, 9/33/72/230, 9/33/97/230, 9/68/72, 9/97/175/202/218, 9/175, 9/202, 11, 13, 14/33/68/72/97, 18, 18/33/68/97/158/175/239, 18/33/72/97/158/175, 18/33/72/97/158/239, 18/33/72/97/175/202, 18/33/72/175/202/237/239, 18/33/72/197/237, 18/68/72, 18/68/72/158/175/237/239, 18/68/72/175/202/239, 18/68/72/239, 18/68/175/223/237/239, 18/68/239, 18/72/97/175/237/239, 18/72/175/197, 18/72/237, 18/72/239, 18/97/175/237/239, 18/97/223/237/239, 18/175, 18/197/239, 18/239, 20/124, 33/68/72, 33/68/72/175/230, 33/68/223/239, 33/72, 33/72/97/197, 33/72/175, 33/175, 39, 44/97, 52, 68/72, 68/72/97, 68/72/97/197, 68/72/197, 68/72/197/239, 68/97/175, 68/97/175/197/223, 72/97/158/223/237, 72/175/197, 97/158/175/197, 97/175, 103, 121, 122, 124, 125, 128, 133, 148, 175, 197, and 197/202, wherein the positions are numbered with reference to SEQ ID NO: 2. In some additional embodiments, the engineered polypeptide comprises at least one substitution or one substitution set selected from 7V/9V, 7V/9V/33V/68L/72E/158Y, 7V/9V/33V/72E/175P/197V/230I, 7V/9V/33V/72E/230I, 7V/9V/68L/72E/197V, 7V/9V/158Y/175P, 7V/9V/175P, 7V/9V/197V, 7V/33V, 7V/68L/72E/175P, 7V/72E, 7V/72E/97I/175P/230I, 9V, 9V/11G/33V/72E/197V/230I, 9V/33V/68L/158Y/197V, 9V/33V/72E/230I, 9V/33V/97I/230I, 9V/68L/72E, 9V/97I/175P/202I/218M, 9V/175P, 9V/202I, 11S, 13G, 14Y/33V/68L/72E/97I, 18C/33V/68L/97I/158Y/175P/239F, 18C/33V/72E/97I/158Y/175P, 18C/33V/72E/97I/158Y/239F, 18C/33V/72E/97I/175P/202I, 18C/33V/72E/175P/202I/237P/239F, 18C/33V/72E/197V/237P, 18C/68L/72E, 18C/68L/72E/158Y/175P/237P/239F, 18C/68L/72E/175P/202I/239F, 18C/68L/72E/239F, 18C/68L/175P/223P/237P/239F, 18C/68L/239F, 18C/72E/97I/175P/237P/239F, 18C/72E/175P/197V, 18C/72E/237P, 18C/72E/239F, 18C/97I/175P/237P/239F, 18C/97I/223P/237P/239F, 18C/175P, 18C/197V/239F, 18C/239F, 18I, 20H/124C, 33V/68L/72E, 33V/68L/72E/175P/230I, 33V/68L/223P/239F, 33V/72E, 33V/72E/97I/197V, 33V/72E/175P, 33V/175P, 39A, 39G, 44N/97I, 52S, 68L/72E, 68L/72E/97I, 68L/72E/97I/197V, 68L/72E/197V, 68L/72E/197V/239F, 68L/97I/175P, 68L/97I/175P/197V/223P, 72E/97I/158Y/223P/237P, 72E/175P/197V, 97I/158Y/175P/197V, 97I/175P, 103M, 103S, 121Y, 122C, 122Q, 124C, 124E, 124T, 124Y, 125R, 128H, 128Y, 133A, 133C, 148M, 175P, 197V, and 197V/202I, wherein the positions are numbered with reference to SEQ ID NO: 2. In some embodiments, the engineered polypeptide comprises at least one substitution or one substitution set selected from 17V/19V, I7V/I9V/A33V/I68L/K72E/F158Y, I7V/I9V/A33V/K72E/K175P/I197V/V230I, I7V/I9V/A33V/K72E/V230I, I7V/I9V/I68L/K72E/I197V, I7V/I9V/F158Y/K175P, I7V/I9V/K175P, I7V/I9V/I197V, I7V/A33V, I7V/I68L/K72E/K175P, I7V/K72E, I7V/K72E/V97I/K175P/V230I, I9V, I9V/T11G/A33V/K72E/I197V/V230I, I9V/A33V/I68L/F158Y/I197V, I9V/A33V/K72E/V230I, I9V/A33V/V97I/V230I, I9V/I68L/K72E, I9V/V97I/K175P/V202I/Q218M, I9V/K175P, I9V/V202I, T11S, C13G, H14Y/A33V/I68L/K72E/V97I, L18C/A33V/I68L/V97I/F158Y/K175P/I239F, L18C/A33V/K72E/V97I/F158Y/K175P, L18C/A33V/K72E/V97I/F158Y/I239F, L18C/A33V/K72E/V97I/K175P/V202I, L18C/A33V/K72E/K175P/V202I/I237P/I239F, L18C/A33V/K72E/I197V/I237P, L18C/I68L/K72E, L18C/I68L/K72E/F158Y/K175P/I237P/I239F, L18C/I68L/K72E/K175P/V202I/I239F, L18C/I68L/K72E/I239F, L18C/I68L/K175P/K223P/I237P/I239F, L18C/168L/I239F, L18C/K72E/V97I/K175P/I237P/I239F, L18C/K72E/K175P/I197V, L18C/K72E/I237P, L18C/K72E/I239F, L18C/V97I/K175P/I237P/I239F, L18C/V97I/K223P/I237P/I239F, L18C/K175P, L18C/I197V/I239F, L18C/I239F, L18I, Y20H/V124C, A33V/I68L/K72E, A33V/I68L/K72E/K175P/V230I, A33V/I68L/K223P/I239F, A33V/K72E, A33V/K72E/V97I/I197V, A33V/K72E/K175P, A33V/K175P, V39A, V39G, D44N/V97I, G52S, I68L/K72E, I68L/K72E/V97I, I68L/K72E/V97I/I197V, I68L/K72E/I197V, I68L/K72E/I197V/I239F, I68L/V97I/K175P, I68L/V97I/K175P/I197V/K223P, K72E/V97I/F158Y/K223P/I237P, K72E/K175P/I197V, V97I/F158Y/K175P/I197V, V97I/K175P, H103M, H103S, F121Y, S122C, S122Q, V124C, V124E, V124T, V124Y, F125R, W128H, W128Y, F133A, F133C, L148M, K175P, I197V, and I197V/V202I, wherein the positions are numbered with reference to SEQ ID NO: 2. In some further embodiments, the engineered polypeptide comprises an amino acid sequence with at least 80% sequence identity to any even-numbered sequence set forth in SEQ ID NO: 4 to SEQ ID NO: 176.

[0012] The present invention also provides an engineered polypeptide comprising an amino acid sequence with at least 80%, 85%, 90%, 91%, 92%, 93%, 94%, 95%, 96%, 97%, 98%, 99% sequence identity to a reference sequence of SEQ ID NO: 2, comprising at least one substitution or one substitution set selected from: 7/11/33/72/97, 7/11/33/97, 7/11/72, 7/11/158, 7/11/237, 7/33/72/97/158/175/197/237/239, 9/11/33, 9/11/33/72, 9/11/72, 9/33/68/97/237/239, 9/72/97/158/237/239, 9/218/239, 10, 11, 12, 13, 14, 18, 33/68/72/97/237/239, 33/72/158/239, 39, 40, 41, 48, 49, 51, 54, 54/126, 57, 68/175/239, 82, 84, 85, 86, 103, 104, 105, 107, 115, 117, 119, 119/120, 120, 122, 123, 124, 127, 130, 131, 133, 134, 137/145, 144, 145, 146, 147, 148, 149, 150, 152, 157, 158, 159, 169, 173, 174, 175, 180, 181, 183, 203, 204, 208, 209, 210, 215, 218, 236, and 237, wherein the positions are numbered with reference to SEQ ID NO: 2. In some embodiments, the engineered polypeptide comprises at least one substitution or one substitution set selected from 7V/11G/33V/72E/97I, 7V/11G/33V/97I, 7V/11G/72E, 7V/11G/158Y, 7V/11G/237P, 7V/33V/72E/97I/158Y/175P/197V/237P/239F, 9V/11G/33V, 9V/11G/33V/72E, 9V/11G/72E, 9V/33V/68L/97I/237P/239F, 9V/72E/97I/158Y/237P/239F, 9V/218M/239F, 10G, 10P, 10R, 11R, 11S, 12K, 13L, 14R, 18S, 18T, 33V/68L/72E/97I/237P/239F, 33V/72E/158Y/239F, 39R, 39W, 40L, 40S, 40T, 40V, 41C, 48W, 49Q, 49R, 51A, 51Q, 51S, 51T, 54N/126I, 54Y, 57N, 68L/175P/239F, 82T, 84L, 85A, 85L, 85M, 85Q, 86W, 103P, 104A, 104G, 104S, 105D, 107G, 107W, 115C, 115K, 115L, 115V, 117C, 117L, 119L, 119N/120F, 120C, 120L, 120Y, 122G, 122T, 123A, 123P, 123T, 124P, 127A, 127L, 127M, 130M, 130V, 131L, 133W, 134D, 134F, 134L, 134R, 134V, 134W, 137I/145V, 144L, 145F, 145L, 145P, 146D, 146G, 146N, 147R, 148P, 148V, 149W, 150I, 150L, 150V, 152P, 157V, 158I, 158L, 158M, 158R, 158W, 158Y, 159G, 159H, 159L, 169G, 169I, 169S, 173E, 173Y, 174C, 174G, 175D, 180G, 180V, 181C, 183K, 203Q, 204E, 204R, 204V, 208A, 208C, 208E, 208G, 208L, 208T, 208V, 209C, 210V, 215L, 218T, 236G, 236L, 237L, 237S, and 237W, wherein the positions are numbered with reference to SEQ ID NO: 2. In some further embodiments, the engineered polypeptide comprises at least one substitution or one substitution set selected from 17V/T11G/A33V/K72E/V97I, I7V/T11G/A33V/V97I, I7V/T11G/K72E, 17V/T11G/F158Y, 17V/T11G/I237P, I7V/A33V/K72E/V97I/F158Y/K175P/I197V/I237P/I239F, I9V/T11G/A33V, I9V/T11G/A33V/K72E, I9V/T11G/K72E, I9V/A33V/I68L/V97I/I237P/I239F, I9V/K72E/V97I/F158Y/I237P/I239F, I9V/Q218M/I239F, H10G, H10P, H10R, TiiR, T11S, I12K, C13L, H14R, L18S, L18T, A33V/I68L/K72E/V97I/I237P/I239F, A33V/K72E/F158Y/I239F, V39R, V39W, A40L, A40S, A40T, A40V, S41C, L48W, E49Q, E49R, I51A, I51Q, I51S, I51T, W54N/T126I, W54Y, Y57N, I68L/K175P/I239F, G82T, I84L, N85A, N85L, N85M, N85Q, I86W, H103P, N104A, N104G, N104S, A105D, M107G, M107W, A115C, A115K, A115L, A115V, V117C, V117L, K119L, K119N/K120F, K120C, K120L, K120Y, S122G, S122T, E123A, E123P, E123T, V124P, D127A, D127L, D127M, D130M, D130V, S131L, F133W, S134D, S134F, S134L, S134R, S134V, S134W, T137I/A145V, T144L, A145F, A145L, A145P, V146D, V146G, V146N, E147R, L148P, L148V, G149W, D150I, D150L, D150V, T152P, I157V, F158I, F158L, F158M, F158R, F158W, F158Y, S159G, S159H, S159L, A169G, A169I, A169S, V173E, V173Y, R174C, R174G, K175D, E180G, E180V, Q181C, L183K, Y203Q, G204E, G204R, G204V, Q208A, Q208C, Q208E, Q208G, Q208L, Q208T, Q208V, I209C, F210V, Q215L, Q218T, K236G, K236L, I237L, I237S, and I237W, wherein the positions are numbered with reference to SEQ ID NO: 2. In some further embodiments, the engineered polypeptide comprises an amino acid sequence with at least 80% sequence identity to any even-numbered sequence set forth in SEQ ID NO: 178 to SEQ ID NO: 462.

[0013] The present invention further provides an engineered polypeptide comprising an amino acid sequence with at least 80%, 85%, 90%, 91%, 92%, 93%, 94%, 95%, 96%, 97%, 98%, 99% sequence identity to a reference sequence of SEQ ID NO: 24, comprising at least at least one substitution or one substitution set selected from 9/39/122/157, 18, 18/33/39/230, 18/33/175, 18/39/44/118, 18/175, 20, 33/39, 33/39/44/118/121, 33/39/44/121, 33/39/44/152, 33/39/44/175, 33/39/44/197, 33/39/44/210/230, 33/39/118/121/175, 33/39/121/175, 33/39/197/210, 33/39/210, 33/39/210/230, 33/118/121, 33/118/121/175, 39, 39/44/103, 39/44/118, 39/44/152/230, 39/44/175/197/230, 39/103, 39/103/125, 39/103/125/127/146, 39/103/125/127/146/150, 39/103/125/146, 39/103/127/150, 39/103/150, 39/118/121, 39/197, 39/197/210, 43, 44/103, 81, 103, 103/125/127, 103/125/146, 103/127, 103/150, 118/121, 118/121/175, 118/121/197, 121, 152, 152/197, 154, 159, 163, 175, 210, 232, and 238, wherein the positions are numbered with reference to SEQ ID NO: 24. In some additional embodiments, the engineered polypeptide comprises at least one substitution or one substitution set selected from 9V/39W/122T/157V, 18I, 18I/33V/39W/230I, 18I/33V/175P, 18I/39W/44N/118L, 18I/175P, 20H, 33V/39W, 33V/39W/44N/118L/121Y, 33V/39W/44N/121Y, 33V/39W/44N/152F, 33V/39W/44N/175P, 33V/39W/44N/197V, 33V/39W/44N/210M/230I, 33V/39W/118L/121Y/175P, 33V/39W/121Y/175P, 33V/39W/197V/210M, 33V/39W/210M, 33V/39W/210M/230I, 33V/118L/121W/175P, 33V/118L/121Y, 39W, 39W/44N/118L, 39W/44N/152F/230I, 39W/44N/175P/197V/230I, 39W/44Y/103S, 39W/103M, 39W/103M/125R/146L, 39W/103M/150P, 39W/103Q, 39W/103S, 39W/103S/125P/127G/146L/150P, 39W/103S/125R, 39W/103S/125R/127G/146L, 39W/103S/127G/150P, 39W/118L/121Y, 39W/197V, 39W/197V/210M, 43M, 43Q, 43R, 43S, 43T, 44N/103S, 81F, 103L, 103M, 103M/125P/146L, 103M/127G, 103Q, 103S, 103S/125P/127G, 103S/150P, 103V, 118L/121Y, 118L/121Y/175P, 118L/121Y/197V, 121Y, 152A/197V, 152F, 154I, 159Q, 163P, 175P, 210M, 232G, and 238M, wherein the positions are numbered with reference to SEQ ID NO: 24. In some further embodiments, the engineered polypeptide comprises at least at least one substitution or one substitution set selected from I9V/V39W/S122T/I157V, L18I, L18I/A33V/V39W/V230I, L18I/A33V/K175P, L18I/V39W/D44N/Y118L, L18I/K175P, Y20H, A33V/V39W, A33V/V39W/D44N/Y118L/F121Y, A33V/V39W/D44N/F121Y, A33V/V39W/D44N/T152F, A33V/V39W/D44N/K175P, A33V/V39W/D44N/I197V, A33V/V39W/D44N/F210M/V230I, A33V/V39W/Y118L/F121Y/K175P, A33V/V39W/F121Y/K175P, A33V/V39W/I197V/F210M, A33V/V39W/F210M, A33V/V39W/F210M/V230I, A33V/Y118L/F121W/K175P, A33V/Y118L/F121Y, V39W, V39W/D44N/Y118L, V39W/D44N/T152F/V230I, V39W/D44N/K175P/I197V/V230I, V39W/D44Y/H103S, V39W/H103M, V39W/H103M/F125R/V146L, V39W/H103M/D150P, V39W/H103Q, V39W/H103S, V39W/H103S/F125P/D127G/V146L/D150P, V39W/H103S/F125R, V39W/H103S/F125R/D127G/V146L, V39W/H103S/D127G/D150P, V39W/Y118L/F121Y, V39W/I197V, V39W/I197V/F210M, I43M, I43Q, I43R, I43S, I43T, D44N/H103S, G81F, H103L, H103M, H103M/F125P/V146L, H103M/D127G, H103Q, H103S, H103S/F125P/D127G, H103S/D150P, H103V, Y118L/F121Y, Y118L/F121Y/K175P, Y118L/F121Y/I197V, F121Y, T152A/I197V, T152F, A154I, S159Q, I163P, K175P, F210M, S232G, and Q238M, wherein the positions are numbered with reference to SEQ ID NO: 24. In some additional embodiments, the engineered polypeptide comprises an amino acid sequence with at least 80% sequence identity to any even-numbered sequence set forth in SEQ ID NO: 464 to SEQ ID NO: 596.

[0014] The present invention further provides an engineered polypeptide comprising an amino acid sequence with at least 80%, 85%, 90%, 91%, 92%, 93%, 94%, 95%, 96%, 97%, 98%, 99% sequence identity to a reference sequence of SEQ ID NO: 24, comprising at least at least one substitution or one substitution set selected from 7, 9/13, 9/13/39, 9/13/39/68/72/239, 9/13/39/68/239, 9/13/39/72/122, 9/13/39/97/239, 9/13/68/72/97/239, 9/13/68/97/134/239, 9/13/68/97/239, 9/13/72, 9/13/134, 11, 12/42/125/127, 12/103, 12/103/150, 13, 13/39, 13/39/68, 13/39/68/72/97, 13/39/72/97/122/134/223, 13/39/97/239, 13/39/239, 13/68, 13/68/72/97/122/239, 16, 18/33/39/44/118/121/175/197/210, 18/33/39/44/121, 18/33/39/112/118/121/197, 18/33/39/121, 18/33/39/121/175, 18/33/39/121/175/197, 18/33/39/121/175/210, 18/33/39/121/210, 18/33/118/121, 18/33/121, 18/33/121/197, 18/33/121/210/230, 18/39/44/118/121/230, 18/39/44/121/175/210, 18/39/118/121, 18/39/118/121/210, 18/39/121/175, 18/39/121/175/210, 18/39/121/197/210, 18/118/121, 18/118/121/175, 18/118/121/210, 18/118/121/230, 18/121, 18/121/175, 18/121/210, 18/121/230, 20, 21, 33/39/44/118/121, 33/39/44/118/121/210/230, 33/39/44/121, 33/39/44/121/152, 33/39/44/121/175/210, 33/39/44/121/230, 33/39/73/121/197, 33/39/118/121/175, 33/39/118/121/175/230, 33/39/121, 33/39/121/175, 33/39/121/210/230, 33/118/121, 33/118/121/175, 33/118/121/197, 33/121, 33/121/230, 37/91, 39/44/118/121/175/210, 39/68/72/239, 39/118/121, 39/118/121/210, 39/121, 39/121/210/230, 43, 44, 76, 79, 101, 118/121, 118/121/175, 118/121/197, 121, 121/175/230, 121/210, 148, 153, 159, 161, 172, 200, 207, 233, 245, and 248, wherein the positions are numbered with reference to SEQ ID NO: 24. In some additional embodiments, the engineered polypeptide comprises at least one substitution or one substitution set selected from 7E, 9V/13G, 9V/13G/39W, 9V/13G/39W/68L/72E/239F, 9V/13G/39W/68L/239F, 9V/13G/39W/72E/122T, 9V/13G/39W/97I/239F, 9V/13G/68L/72E/97I/239F, 9V/13G/68L/97I/134D/239F, 9V/13G/68L/97I/239F, 9V/13G/72E, 9V/13G/134D, 11N, 12A/42W/125R/127G, 12A/103S, 12A/103S/150P, 13F, 13G/39W, 13G/39W/68L, 13G/39W/68L/72E/97I, 13G/39W/72E/97I/122T/134D/223P, 13G/39W/97I/239F, 13G/39W/239F, 13G/68L, 13G/68L/72E/97I/122T/239F, 16M, 16V, 18C/33V/39W/112R/118L/121W/197V, 18C/33V/39W/121W/175P/210M, 18C/33V/39W/121W/210M, 18C/33V/39W/121Y/175P, 18C/33V/118L/121W, 18C/33V/118L/121Y, 18C/33V/121Y, 18C/33V/121Y/197V, 18C/33V/121Y/210M/230I, 18C/39W/44N/121Y/175P/210M, 18C/39W/118L/121W, 18C/39W/121W/175P/210M, 18C/39W/121W/197V/210M, 18C/118L/121W, 18C/118L/121Y, 18C/121V, 18C/121V/175P, 18C/121W, 18C/121W/175P, 18C/121W/210M, 18C/121Y, 18C/121Y/230I, 18I/33V/39W/44N/118L/121W/175P/197V/210M, 18I/33V/39W/44N/121T, 18I/33V/39W/121T/175P, 18I/33V/39W/121V/175P/197V, 18I/33V/39W/121W, 18I/33V/118L/121W, 18I/39W/44N/118L/121W/230I, 18I/39W/44N/121V/175P/210M, 18I/39W/118L/121W/210M, 18I/39W/121V/175P, 18I/118L/121T, 18I/118L/121W, 18I/118L/121W/175P, 18I/118L/121W/210M, 18I/118L/121Y, 18I/118L/121Y/230I, 18I/121T/175P, 18I/121W, 18I/121Y/210M, 20G, 20K, 20R, 20T, 21V, 33V/39G/44N/121W/152A, 33V/39W/44N/118L/121W/210M/230I, 33V/39W/44N/118L/121Y, 33V/39W/44N/121V, 33V/39W/44N/121Y, 33V/39W/44N/121Y/175P/210M, 33V/39W/44N/121Y/230I, 33V/39W/73N/121Y/197V, 33V/39W/118L/121W/175P, 33V/39W/118L/121Y/175P, 33V/39W/118L/121Y/175P/230I, 33V/39W/121V, 33V/39W/121W, 33V/39W/121W/210M/230I, 33V/39W/121Y/175P, 33V/118L/121W/175P, 33V/118L/121W/197V, 33V/118L/121Y, 33V/121W, 33V/121Y/230I, 37L/91G, 39G/68L/72E/239F, 39W/44N/118L/121W/175P/210M, 39W/118L/121W/210M, 39W/118L/121Y, 39W/118L/121Y/210M, 39W/121W, 39W/121W/210M/230I, 43E, 43Q, 43S, 43W, 44V, 76P, 79F, 101L, 118L/121W, 118L/121Y, 118L/121Y/175P, 118L/121Y/197V, 121V, 121W, 121Y, 121Y/175P/230I, 121Y/210M, 148F, 153W, 159Q, 161M, 172A, 172E, 172G, 172Q, 172R, 172V, 200G, 207N, 233R, 245D, 245G, 248G, and 248S, wherein the positions are numbered with reference to SEQ ID NO: 24. In some further embodiments, the engineered polypeptide comprises at least at least one substitution or one substitution set selected from 17E, I9V/C13G, I9V/C13G/V39W, I9V/C13G/V39W/168L/K72E/I239F, I9V/C13G/V39W/168L/I239F, I9V/C13G/V39W/K72E/S122T, I9V/C13G/V39W/V97I/I239F, I9V/C13G/I68L/K72E/V97I/I239F, I9V/C13G/168L/V97I/S134D/I239F, I9V/C13G/168L/V97I/I239F, I9V/C13G/K72E, I9V/C13G/S134D, S11N, 112A/G42W/F125R/D127G, 112A/H103S, 112A/H103S/D150P, C13F, C13G/V39W, C13G/V39W/I68L, C13G/V39W/I68L/K72E/V97I, C13G/V39W/K72E/V97I/S122T/S134D/K223P, C13G/V39W/V97I/I239F, C13G/V39W/I239F, C13G/I68L, C13G/I68L/K72E/V97I/S122T/I239F, A16M, A16V, L18C/A33V/V39W/H112R/Y118L/F121W/1197V, L18C/A33V/V39W/F121W/K175P/F210M, L18C/A33V/V39W/F121W/F210M, L18C/A33V/V39W/F121Y/K175P, L18C/A33V/Y118L/F121W, L18C/A33V/Y118L/F121Y, L18C/A33V/F121Y, L18C/A33V/F121Y/1197V, L18C/A33V/F121Y/F210M/V230I, L18C/V39W/D44N/F121Y/K175P/F210M, L18C/V39W/Y118L/F121W, L18C/V39W/F121W/K175P/F210M, L18C/V39W/F121W/1197V/F210M, L18C/Y118L/F121W, L18C/Y118L/F121Y, L18C/F121V, L18C/F121V/K175P, L18C/F121W, L18C/F121W/K175P, L18C/F121W/F210M, L18C/F121Y, L18C/F121Y/V230I, L18I/A33V/V39W/D44N/Y118L/F121W/K175P/I197V/F210M, L18I/A33V/V39W/D44N/F121T, L18I/A33V/V39W/F121T/K175P, L18I/A33V/V39W/F121V/K175P/I197V, L18I/A33V/V39W/F121W, L18I/A33V/Y118L/F121W, L18I/V39W/D44N/Y118L/F121W/V230I, L18I/V39W/D44N/F121V/K175P/F210M, L18I/V39W/Y118L/F121W/F210M, L18I/V39W/F121V/K175P, L18I/Y118L/F121T, L18I/Y118L/F121W, L18I/Y118L/F121W/K175P, L18I/Y118L/F121W/F210M, L18I/Y118L/F121Y, L18I/Y118L/F121Y/V230I, L18I/F121T/K175P, L18I/F121W, L18I/F121Y/F210M, Y20G, Y20K, Y20R, Y20T, K21V, A33V/V39G/D44N/F121W/T152A, A33V/V39W/D44N/Y118L/F121W/F210M/V230I, A33V/V39W/D44N/Y118L/F121Y, A33V/V39W/D44N/F121V, A33V/V39W/D44N/F121Y, A33V/V39W/D44N/F121Y/K175P/F210M, A33V/V39W/D44N/F121Y/V230I, A33V/V39W/K73N/F121Y/I197V, A33V/V39W/Y118L/F121W/K175P, A33V/V39W/Y118L/F121Y/K175P, A33V/V39W/Y118L/F121Y/K175P/V230I, A33V/V39W/F121V, A33V/V39W/F121W, A33V/V39W/F121W/F210M/V230I, A33V/V39W/F121Y/K175P, A33V/Y118L/F121W/K175P, A33V/Y118L/F121W/I197V, A33V/Y118L/F121Y, A33V/F121W, A33V/F121Y/V230I, D37L/E91G, V39G/I68L/K72E/I239F, V39W/D44N/Y118L/F121W/K175P/F210M, V39W/Y118L/F121W/F210M, V39W/Y118L/F121Y, V39W/Y118L/F121Y/F210M, V39W/F121W, V39W/F121W/F210M/V230I, I43E, I43Q, I43S, I43W, D44V, L76P, E79F, V101L, Y118L/F121W, Y118L/F121Y, Y118L/F121Y/K175P, Y118L/F121Y/I197V, F121V, F121W, F121Y, F121Y/K175P/V230I, F121Y/F210M, L148F, L153W, S159Q, S161M, L172A, L172E, L172G, L172Q, L172R, L172V, V200G, D207N, A233R, L245D, L245G, I248G, and I248S, wherein the positions are numbered with reference to SEQ ID NO: 24. In some additional embodiments, the engineered polypeptide comprises an amino acid sequence with at least 80% sequence identity to any even-numbered sequence set forth in SEQ ID NO: 598 to SEQ ID NO: 842.

[0015] The present invention further provides an engineered polypeptide comprising an amino acid sequence with at least 80%, 85%, 90%, 91%, 92%, 93%, 94%, 95%, 96%, 97%, 98%, 99% sequence identity to a reference sequence of SEQ ID NO: 496, comprising at least at least one substitution or one substitution set selected from 43/103, 43/103/172/238, 43/103/238/241, 43/238, 81/232, 103, 103/159/238, 103/194/238, 103/238, 122, 232, 238, and 238/241, wherein the positions are numbered with reference to SEQ ID NO: 496. In some additional embodiments, the engineered polypeptide comprises at least one substitution or one substitution set selected from 43E/103S/238M/241R, 43M/103L, 43Q/103S/238M/241R, 43Q/238M, 43S/103S/172R/238M, 43S/238M, 81F/232G, 103L, 103S, 103S/159Q/238M, 103S/194L/238M, 103S/238M, 103V, 122C, 122I, 122K, 122L, 122M, 122Q, 122R, 122T, 122V, 232G, 238M, and 238M/241R, wherein the positions are numbered with reference to SEQ ID NO: 496. In some further embodiments, the engineered polypeptide comprises at least at least one substitution or one substitution set selected from I43E/H103S/Q238M/K241R, I43M/H103L, I43Q/H103S/Q238M/K241R, I43Q/Q238M, I43S/H103S/L172R/Q238M, I43S/Q238M, G81F/S232G, H103L, H103S, H103S/S159Q/Q238M, H103S/Y194L/Q238M, H103S/Q238M, H103V, S122C, S122I, S122K, S122L, S122M, S122Q, S122R, S122T, S122V, S232G, Q238M, and Q238M/K241R, wherein the positions are numbered with reference to SEQ ID NO: 496. In some additional embodiments, the engineered polypeptide comprises an amino acid sequence with at least 80% sequence identity to any even-numbered sequence set forth in SEQ ID NO: 844 to SEQ ID NO: 892.

[0016] The present invention further provides an engineered polypeptide comprising an amino acid sequence with at least 80%, 85%, 90%, 91%, 92%, 93%, 94%, 95%, 96%, 97%, 98%, 99% sequence identity to a reference sequence of SEQ ID NO: 496, comprising at least at least one substitution or one substitution set selected from 12, 43, 43/47/103, 43/47/103/232, 43/103, 43/103/121/172/241, 43/103/172, 43/103/172/238, 43/103/238, 43/103/238/241, 43/121, 43/194/238, 43/238, 44/103/121/238, 44/103/238, 44/103/238/241, 44/121/238/241, 47/103, 63, 103, 103/121, 103/121/172/238, 103/159/238, 103/172/238, 103/194/238, 103/238, 122, 131, 146, 178, 180, and 221, wherein the positions are numbered with reference to SEQ ID NO: 496. In some additional embodiments, the engineered polypeptide comprises at least one substitution or one substitution set selected from 12V, 43E/103S/121W/172R/241R, 43E/103S/238M, 43E/103S/238M/241R, 43M/47G/103L, 43M/47G/103V, 43M/103L, 43M/103S, 43M/103V, 43Q/47G/103S/232G, 43Q/103L/172R, 43Q/103S, 43Q/103S/238M/241R, 43Q/121W, 43Q/238M, 43S, 43S/103L, 43S/103S, 43S/103S/172R, 43S/103S/172R/238M, 43S/103S/238M/241R, 43S/194L/238M, 43S/238M, 44V/103S/121W/238M, 44V/103S/238M, 44V/103S/238M/241R, 44V/121W/238M/241R, 47G/103L, 63P, 103L, 103S, 103S/121W, 103S/121W/172R/238M, 103S/159Q/238M, 103S/172R/238M, 103S/194L/238M, 103S/238M, 103V, 122H, 122I, 122K, 122L, 122M, 122N, 122R, 122T, 122V, 131Y, 146I, 178A, 180L, 180V, and 221G, wherein the positions are numbered with reference to SEQ ID NO: 496. In some further embodiments, the engineered polypeptide comprises at least at least one substitution or one substitution set selected from I12V, I43E/H103S/Y121W/L172R/K241R, I43E/H103S/Q238M, I43E/H103S/Q238M/K241R, I43M/Q47G/H103L, I43M/Q47G/H103V, I43M/H103L, I43M/H103S, I43M/H103V, I43Q/Q47G/H103S/S232G, I43Q/H103L/L172R, I43Q/H103S, I43Q/H103S/Q238M/K241R, I43Q/Y121W, I43Q/Q238M, I43S, I43S/H103L, I43S/H103S, I43S/H103S/L172R, I43S/H103S/L172R/Q238M, I43S/H103S/Q238M/K241R, I43S/Y194L/Q238M, I43S/Q238M, N44V/H103S/Y121W/Q238M, N44V/H103S/Q238M, N44V/H103S/Q238M/K241R, N44V/Y121W/Q238M/K241R, Q47G/H103L, T63P, H103L, H103S, H103S/Y121W, H103S/Y121W/L172R/Q238M, H103S/S159Q/Q238M, H103S/L172R/Q238M, H103S/Y194L/Q238M, H103S/Q238M, H103V, S122H, S122I, S122K, S122L, S122M, S122N, S122R, S122T, S122V, S131Y, V146I, F178A, E180L, E180V, and N221G, wherein the positions are numbered with reference to SEQ ID NO: 496. In some additional embodiments, the engineered polypeptide comprises an amino acid sequence with at least 80% sequence identity to any even-numbered sequence set forth in SEQ ID NO: 894 to SEQ ID NO: 980.

[0017] The present invention further provides an engineered polypeptide comprising an amino acid sequence with at least 80%, 85%, 90%, 91%, 92%, 93%, 94%, 95%, 96%, 97%, 98%, 99% sequence identity to a reference sequence of SEQ ID NO: 860, comprising at least at least one substitution or one substitution set selected from 12, 12/43/63/103/146/180/232/241, 12/43/63/103/146/241, 12/43/81/103/241, 12/43/81/146/232/241, 12/43/81/180/241, 12/43/81/232/241, 12/43/81/241, 12/43/103, 12/43/103/146/180/232/241, 12/43/103/146/180/241, 12/43/103/180/241, 12/43/103/241, 12/43/146/180/232/241, 12/43/180/241, 12/63/81/103/241, 12/81, 12/81/180/241, 12/103/146/241, 12/103/180/241, 12/146, 12/146/180/241, 12/180/232/241, 12/241, 18, 43/81/232/241, 43/103/146/180, 43/103/180/241, 43/103/241, 43/180/232, 43/232/241, 63/103/180/232, 78, 81, 81/103/146, 81/146/180/241, 81/146/241, 81/180/241, 84, 103, 103/146, 103/146/180, 103/146/180/241, 103/180, 103/180/241, 103/261, 144, 145, 146/180/232, 146/180/241, 146/241, 150, 166, 172, 180/232, 232/241, and 241, wherein the positions are numbered with reference to SEQ ID NO: 860. In some additional embodiments, the engineered polypeptide comprises at least one substitution or one substitution set selected from 12V, 12V/43M/63P/103L/146I/180L/232G/241R, 12V/43M/81F/103L/241R, 12V/43M/81F/146I/232G/241R, 12V/43M/81F/180V/241R, 12V/43M/81F/232G/241R, 12V/43M/81F/241R, 12V/43M/103L/180L/241R, 12V/43M/103L/241R, 12V/43M/103V/146I/180V/241R, 12V/43M/103V/241R, 12V/43M/146I/180L/232G/241R, 12V/43M/180L/241R, 12V/43M/180V/241R, 12V/43Q/63P/103L/146I/241R, 12V/43Q/103L/146I/180V/232G/241R, 12V/43Q/103L/146I/180V/241R, 12V/43Q/103L/180V/241R, 12V/43Q/103V, 12V/63P/81F/103L/241R, 12V/81F, 12V/81F/180V/241R, 12V/103L/146I/241R, 12V/103L/180L/241R, 12V/103V/180V/241R, 12V/146I, 12V/146I/180L/241R, 12V/180L/232G/241R, 12V/180V/232G/241R, 12V/241R, 18V, 43M/81F/232G/241R, 43M/103L/146I/180V, 43M/103L/180V/241R, 43M/103L/241R, 43M/103V/146I/180V, 43M/180L/232G, 43M/232G/241R, 43Q/103V/146I/180L, 63P/103L/180L/232G, 78A, 81F/103L/146I, 81F/146I/180L/241R, 81F/146I/241R, 81F/180L/241R, 81Q, 84Y, 103A, 103L, 103L/146I, 103L/146I/180V, 103L/180L, 103L/180V/241R, 103N, 103T, 103T/261V, 103V/146I/180L/241R, 144V, 145V, 146I/180L/241R, 146I/180V/232G, 146I/241R, 150H, 166L, 172L, 172V, 180L/232G, 232G/241R, and 241R, wherein the positions are numbered with reference to SEQ ID NO: 860. In some further embodiments, the engineered polypeptide comprises at least at least one substitution or one substitution set selected from 112V, I12V/S43M/T63P/S103L/V146I/E180L/S232G/K241R, I12V/S43M/G81F/S103L/K241R, I12V/S43M/G81F/V146I/S232G/K241R, I12V/S43M/G81F/E180V/K241R, I12V/S43M/G81F/S232G/K241R, I12V/S43M/G81F/K241R, I12V/S43M/S103L/E180L/K241R, I12V/S43M/S103L/K241R, I12V/S43M/S103V/V146I/E180V/K241R, I12V/S43M/S103V/K241R, I12V/S43M/V146I/E180L/S232G/K241R, I12V/S43M/E180L/K241R, I12V/S43M/E180V/K241R, I12V/S43Q/T63P/S103L/V146I/K241R, I12V/S43Q/S103L/V146I/E180V/S232G/K241R, I12V/S43Q/S103L/V146I/E180V/K241R, I12V/S43Q/S103L/E180V/K241R, I12V/S43Q/S103V, I12V/T63P/G81F/S103L/K241R, I12V/G81F, I12V/G81F/E180V/K241R, I12V/S103L/V146I/K241R, I12V/S103L/E180L/K241R, I12V/S103V/E180V/K241R, 112V/V146I, I12V/V146I/E180L/K241R, I12V/E180L/S232G/K241R, I12V/E180V/S232G/K241R, I12V/K241R, L18V, S43M/G81F/S232G/K241R, S43M/S103L/V146I/E180V, S43M/S103L/E180V/K241R, S43M/S103L/K241R, S43M/S103V/V146I/E180V, S43M/E180L/S232G, S43M/S232G/K241R, S43Q/S103V/V146I/E180L, T63P/S103L/E180L/S232G, G78A, G81F/S103L/V146I, G81F/V146I/E180L/K241R, G81F/V146I/K241R, G81F/E180L/K241R, G81Q, I84Y, S103A, S103L, S103L/V146I, S103L/V146I/E180V, S103L/E180L, S103L/E180V/K241R, S103N, S103T, S103T/A261V, S103V/V146I/E180L/K241R, T144V, A145V, V146I/E180L/K241R, V146I/E180V/S232G, V146I/K241R, D150H, V166L, R172L, R172V, E180L/S232G, S232G/K241R, and K241R, wherein the positions are numbered with reference to SEQ ID NO: 860. In some additional embodiments, the engineered polypeptide comprises an amino acid sequence with at least 80% sequence identity to any even-numbered sequence set forth in SEQ ID NO: 982 to SEQ ID NO: 1118.

[0018] The present invention further provides an engineered polypeptide comprising an amino acid sequence with at least 80%, 85%, 90%, 91%, 92%, 93%, 94%, 95%, 96%, 97%, 98%, 99% sequence identity to a reference sequence of SEQ ID NO: 860, comprising at least at least one substitution or one substitution set selected from 9, 12, 12/43/63/103/146/180/232/241, 12/43/63/103/146/241, 12/43/103/146/180/232/241, 12/43/103/146/180/241, 12/43/103/146/232/241, 12/43/103/146/241, 12/43/103/180/241, 12/43/146/180/232/241, 12/43/146/241, 12/43/180/232, 12/43/180/241, 12/63/103/146/232/241, 12/103/146/241, 12/103/180/241, 12/146, 12/146/180/241, 12/146/232/241, 12/146/241, 12/180, 12/180/232/241, 12/180/241, 12/241, 18, 43/63/103/180/232/241, 43/103/146/180, 43/103/180, 43/103/180/232/241, 43/103/180/241, 43/180/232, 63/103/180/232, 103, 103/146/180, 103/146/180/241, 103/180, 103/180/241, 103/241, 118, 119, 122, 144, 145, 146/180/241, 154, 160, 172, 180/232, 180/232/241, 180/241, 208, 211, and 212, wherein the positions are numbered with reference to SEQ ID NO: 860. In some additional embodiments, the engineered polypeptide comprises at least one substitution or one substitution set selected from 9V, 12V, 12V/43M/63P/103L/146I/180L/232G/241R, 12V/43M/103L/146I/241R, 12V/43M/103L/180L/241R, 12V/43M/103V/146I/180V/241R, 12V/43M/103V/146I/232G/241R, 12V/43M/146I/180L/232G/241R, 12V/43M/180L/232G, 12V/43M/180L/241R, 12V/43Q/63P/103V/146I/241R, 12V/43Q/103L/146I/180V/232G/241R, 12V/43Q/103L/146I/180V/241R, 12V/43Q/103L/146I/241R, 12V/43Q/103L/180V/241R, 12V/43Q/146I/241R, 12V/63P/103L/146I/232G/241R, 12V/103L/180L/241R, 12V/103L/180V/241R, 12V/103V/146I/241R, 12V/103V/180L/241R, 12V/103V/180V/241R, 12V/146I, 12V/146I/180L/241R, 12V/146I/232G/241R, 12V/146I/241R, 12V/180L, 12V/180L/232G/241R, 12V/180L/241R, 12V/180V, 12V/180V/232G/241R, 12V/180V/241R, 12V/241R, 18V, 43M/63P/103L/180V/232G/241R, 43M/103L/146I/180V, 43M/103L/180V, 43M/103L/180V/241R, 43M/103V/146I/180V, 43M/180L/232G, 43Q/103L/180V/232G/241R, 43Q/103V/146I/180L, 43Q/103V/180L/241R, 43Q/103V/180V/232G/241R, 63P/103L/180L/232G, 103A, 103L, 103L/146I/180V, 103L/146I/180V/241R, 103L/180L, 103L/180V/241R, 103L/241R, 103N, 103T, 103V/146I/180L/241R, 103V/180V/241R, 118L, 118V, 119H, 122H, 144H, 144V, 145V, 146I/180L/241R, 154R, 160L, 172C, 172L, 172V, 180L/232G, 180L/241R, 180V/232G, 180V/232G/241R, 208F, 211F, and 212P, wherein the positions are numbered with reference to SEQ ID NO: 860. In some further embodiments, the engineered polypeptide comprises at least at least one substitution or one substitution set selected from I9V, 112V, I12V/S43M/T63P/S103L/V146I/E180L/S232G/K241R, I12V/S43M/S103L/V146I/K241R, I12V/S43M/S103L/E180L/K241R, I12V/S43M/S103V/V146I/E180V/K241R, I12V/S43M/S103V/V146I/S232G/K241R, I12V/S43M/V146I/E180L/S232G/K241R, I12V/S43M/E180L/S232G, I12V/S43M/E180L/K241R, I12V/S43Q/T63P/S103V/V146I/K241R, I12V/S43Q/S103L/V146I/E180V/S232G/K241R, I12V/S43Q/S103L/V146I/E180V/K241R, I12V/S43Q/S103L/V146I/K241R, I12V/S43Q/S103L/E180V/K241R, I12V/S43Q/V146I/K241R, I12V/T63P/S103L/V146I/S232G/K241R, I12V/S103L/E180L/K241R, I12V/S103L/E180V/K241R, I12V/S103V/V146I/K241R, I12V/S103V/E180L/K241R, I12V/S103V/E180V/K241R, 112V/V146I, I12V/V146I/E180L/K241R, I12V/V146I/S232G/K241R, I12V/V146I/K241R, I12V/E180L, I12V/E180L/S232G/K241R, I12V/E180L/K241R, I12V/E180V, I12V/E180V/S232G/K241R, I12V/E180V/K241R, I12V/K241R, L18V, S43M/T63P/S103L/E180V/S232G/K241R, S43M/S103L/V146I/E180V, S43M/S103L/E180V, S43M/S103L/E180V/K241R, S43M/S103V/V146I/E180V, S43M/E180L/S232G, S43Q/S103L/E180V/S232G/K241R, S43Q/S103V/V146I/E180L, S43Q/S103V/E180L/K241R, S43Q/S103V/E180V/S232G/K241R, T63P/S103L/E180L/S232G, S103A, S103L, S103L/V146I/E180V, S103L/V146I/E180V/K241R, S103L/E180L, S103L/E180V/K241R, S103L/K241R, S103N, S103T, S103V/V146I/E180L/K241R, S103V/E180V/K241R, Y118L, Y118V, K119H, S122H, T144H, T144V, A145V, V146I/E180L/K241R, A154R, N160L, R172C, R172L, R172V, E180L/S232G, E180L/K241R, E180V/S232G, E180V/S232G/K241R, Q208F, S211F, and R212P, wherein the positions are numbered with reference to SEQ ID NO: 860. In some additional embodiments, the engineered polypeptide comprises an amino acid sequence with at least 80% sequence identity to any even-numbered sequence set forth in SEQ ID NO: 1120 to SEQ ID NO: 1212.

[0019] The present invention further provides an engineered polypeptide comprising an amino acid sequence with at least 80%, 85%, 90%, 91%, 92%, 93%, 94%, 95%, 96%, 97%, 98%, 99% sequence identity to a reference sequence of SEQ ID NO: 1120, comprising at least at least one substitution or one substitution set selected from 3, 7, 7/158, 7/158/175, 7/158/197/202, 27/43/115/172, 27/43/172, 29, 32, 43/110/115/172, 44, 46, 48/172, 55, 59, 67, 71, 72, 73, 94/103/118/146, 103, 103/144/146/172/180, 103/146/154/172/180/232, 103/154, 118, 118/144/215, 118/172/180, 137, 142, 146, 146/154, 154, 158, 172/190, 184, 198, 205, 216, 223, 226, 229, 247, 261, and 263, wherein the positions are numbered with reference to SEQ ID NO: 1120. In some additional embodiments, the engineered polypeptide comprises at least one substitution or one substitution set selected from 3D, 7V, 7V/158Y, 7V/158Y/175P, 7V/158Y/197V/202I, 27E/43I/115S/172L, 27E/43I/172L, 29G, 29R, 32G, 32R, 43I/110T/115S/172L, 44S, 46H, 46V, 48I/172L, 55A, 55G, 55R, 55S, 59G, 59T, 67N, 71S, 72G, 73R, 94Q/103L/118V/146I, 103L, 103L/144V/146I/172L/180V, 103L/146I/154R/172L/180V/232G, 103L/154R, 118V, 118V/144V/215H, 118V/172L/180V, 137M, 137R, 142V, 146I, 146I/154R, 154R, 158Y, 172L/190S, 184S, 198L, 205G, 205L, 216M, 216V, 223A, 223C, 223E, 223L, 223M, 223S, 226L, 226V, 229L, 229V, 229W, 247V, 261G, 261H, 263E, 263G, 263L, and 263S, wherein the positions are numbered with reference to SEQ ID NO: 1120. In some further embodiments, the engineered polypeptide comprises at least at least one substitution or one substitution set selected from S3D, I7V, I7V/F158Y, I7V/F158Y/K175P, I7V/F158Y/I197V/V202I, Q27E/S43I/A115S/R172L, Q27E/S43I/R172L, A29G, A29R, N32G, N32R, S43I/I110T/A115S/R172L, N44S, R46H, R46V, L48I/R172L, E55A, E55G, E55R, E55S, E59G, E59T, S67N, G71S, K72G, K73R, P94Q/V103L/Y118V/V146I, V103L, V103L/T144V/V146I/R172L/L180V, V103L/V146I/A154R/R172L/L180V/S232G, V103L/A154R, Y118V, Y118V/T144V/Q215H, Y118V/R172L/L180V, T137M, T137R, T142V, V146I, V146I/A154R, A154R, F158Y, R172L/T190S, D184S, R198L, E205G, E205L, L216M, L216V, K223A, K223C, K223E, K223L, K223M, K223S, K226L, K226V, C229L, C229V, C229W, Q247V, A261G, A261H, A263E, A263G, A263L, and A263S, wherein the positions are numbered with reference to SEQ ID NO: 1120. In some additional embodiments, the engineered polypeptide comprises an amino acid sequence with at least 80% sequence identity to any even-numbered sequence set forth in SEQ ID NO: 1214 to SEQ ID NO: 1344.

[0020] The present invention further provides an engineered polypeptide comprising an amino acid sequence with at least 80%, 85%, 90%, 91%, 92%, 93%, 94%, 95%, 96%, 97%, 98%, 99% sequence identity to a reference sequence of SEQ ID NO: 1120, comprising at least at least one substitution or one substitution set selected from 73, 80, 103/146/209, 103/172/209, 118/119/172/209, 135, 144/209/232, 172/180/209, 181, and 223, wherein the positions are numbered with reference to SEQ ID NO: 1120. In some additional embodiments, the engineered polypeptide comprises at least one substitution or one substitution set selected from 73R, 80A, 80G, 103L/146I/209C, 103L/172C/209C, 118V/119H/172C/209C, 135V, 144V/209C/232G, 172C/180V/209C, 181S, and 223E, wherein the positions are numbered with reference to SEQ ID NO: 1120. In some further embodiments, the engineered polypeptide comprises at least at least one substitution or one substitution set selected from K73R, S80A, S80G, V103L/V146I/I209C, V103L/R172C/I209C, Y118V/K119H/R172C/I209C, N135V, T144V/I209C/S232G, R172C/L180V/I209C, Q181S, and K223E, wherein the positions are numbered with reference to SEQ ID NO: 1120. In some additional embodiments, the engineered polypeptide comprises an amino acid sequence with at least 80% sequence identity to any even-numbered sequence set forth in SEQ ID NO: 1346 to SEQ ID NO: 1366.

[0021] The present invention further provides an engineered polypeptide comprising an amino acid sequence with at least 80%, 85%, 90%, 91%, 92%, 93%, 94%, 95%, 96%, 97%, 98%, 99% sequence identity to a reference sequence of SEQ ID NO: 1348, comprising at least at least one substitution or one substitution set selected from 2, 7/46, 39, 46, 46/55, 46/55/72, 46/55/92, 46/55/118, 46/55/226/257/263, 46/55/263, 46/70, 46/70/92/118/261/263, 46/70/175/263, 46/72, 46/118, 55/257/261, 55/261/263, 55/263, 105, 118, 118/226/261/263, and 263, wherein the positions are numbered with reference to SEQ ID NO: 1348. In some additional embodiments, the engineered polypeptide comprises at least one substitution or one substitution set selected from 2G, 7V/46H, 39F, 39G, 39M, 39Q, 39S, 39T, 39V, 46H, 46H/55R, 46H/55R/72C, 46H/55R/92A, 46H/55R/118V, 46H/55R/226V/257Q/263L, 46H/55R/263L, 46H/70N, 46H/70N/92A/118V/261G/263L, 46H/70N/175P/263G, 46H/72C, 46H/118V, 55R/257Q/261G, 55R/261G/263I, 55R/263G, 105G, 118V, 118V/226V/261G/263I, and 263G, wherein the positions are numbered with reference to SEQ ID NO: 1348. In some further embodiments, the engineered polypeptide comprises at least at least one substitution or one substitution set selected from V2G, I7V/R46H, W39F, W39G, W39M, W39Q, W39S, W39T, W39V, R46H, R46H/E55R, R46H/E55R/K72C, R46H/E55R/K92A, R46H/E55R/Y118V, R46H/E55R/K226V/S257Q/A263L, R46H/E55R/A263L, R46H/E70N, R46H/E70N/K92A/Y118V/A261G/A263L, R46H/E70N/K175P/A263G, R46H/K72C, R46H/Y118V, E55R/S257Q/A261G, E55R/A261G/A263I, E55R/A263G, A105G, Y118V, Y118V/K226V/A261G/A263I, and A263G, wherein the positions are numbered with reference to SEQ ID NO: 1348. In some additional embodiments, the engineered polypeptide comprises an amino acid sequence with at least 80% sequence identity to any even-numbered sequence set forth in SEQ ID NO: 1368 to SEQ ID NO: 1422.

[0022] The present invention further provides an engineered polypeptide comprising an amino acid sequence with at least 80%, 85%, 90%, 91%, 92%, 93%, 94%, 95%, 96%, 97%, 98%, 99% sequence identity to a reference sequence of SEQ ID NO: 1348, comprising at least at least one substitution or one substitution set selected from 2, 7/46, 7/46/175, 22/46/55/118, 27/46/72, 27/46/146/158/202, 27/46/175, 27/118, 29/70/118, 39, 46, 46/55, 46/55/59/261/263, 46/55/72, 46/55/92, 46/55/118, 46/55/118/263, 46/55/146, 46/55/146/202, 46/55/226/257/263, 46/55/263, 46/70, 46/70/92/118/261/263, 46/70/175/263, 46/72, 46/92, 46/92/175, 46/118, 46/146, 46/146/257/263, 55/70/118, 55/257/261, 55/257/263, 55/261/263, 55/263, 70, 92/118, 105, 118, 118/226/261/263, 146/257/263, 146/261/263, 192/257/261, 202, 257/261/263, 261/263, and 263, wherein the positions are numbered with reference to SEQ ID NO: 1348. In some additional embodiments, the engineered polypeptide comprises at least one substitution or one substitution set selected from 2G, 7V/46H, 7V/46H/175P, 22V/46H/55R/118V, 27G/46H/72C, 27G/46H/146I/158Y/202I, 27G/46H/175P, 27G/118V, 29V/70N/118V, 39M, 39Q, 39S, 39T, 39V, 46H, 46H/55R, 46H/55R/59T/261G/263L, 46H/55R/72C, 46H/55R/92A, 46H/55R/118V, 46H/55R/118V/263S, 46H/55R/146I, 46H/55R/146I/202I, 46H/55R/226V/257Q/263L, 46H/55R/263L, 46H/70N, 46H/70N/92A/118V/261G/263L, 46H/70N/175P/263G, 46H/72C, 46H/92A, 46H/92A/175P, 46H/118V, 46H/146I, 46H/146I/257Q/263I, 55R/70N/118V, 55R/257Q/261G, 55R/257Q/263L, 55R/261G/263I, 55R/263G, 70N, 92A/118V, 105G, 118V, 118V/226V/261G/263I, 146I/257Q/263S, 146I/261G/263L, 192V/257Q/261G, 202I, 257Q/261G/263G, 261G/263I, and 263G, wherein the positions are numbered with reference to SEQ ID NO: 1348. In some further embodiments, the engineered polypeptide comprises at least at least one substitution or one substitution set selected from V2G, I7V/R46H, I7V/R46H/K175P, L22V/R46H/E55R/Y118V, Q27G/R46H/K72C, Q27G/R46H/V146I/F158Y/V202I, Q27G/R46H/K175P, Q27G/Y118V, A29V/E70N/Y118V, W39M, W39Q, W39S, W39T, W39V, R46H, R46H/E55R, R46H/E55R/E59T/A261G/A263L, R46H/E55R/K72C, R46H/E55R/K92A, R46H/E55R/Y118V, R46H/E55R/Y118V/A263S, R46H/E55R/V146I, R46H/E55R/V146I/V202I, R46H/E55R/K226V/S257Q/A263L, R46H/E55R/A263L, R46H/E70N, R46H/E70N/K92A/Y118V/A261G/A263L, R46H/E70N/K175P/A263G, R46H/K72C, R46H/K92A, R46H/K92A/K175P, R46H/Y118V, R46H/V146I, R46H/V146I/S257Q/A263I, E55R/E70N/Y118V, E55R/S257Q/A261G, E55R/S257Q/A263L, E55R/A261G/A263I, E55R/A263G, E70N, K92A/Y118V, A105G, Y118V, Y118V/K226V/A261G/A263I, V146I/S257Q/A263S, V146I/A261G/A263L, E192V/S257Q/A261G, V202I, S257Q/A261G/A263G, A261G/A263I, and A263G, wherein the positions are numbered with reference to SEQ ID NO: 1348. In some additional embodiments, the engineered polypeptide comprises an amino acid sequence with at least 80% sequence identity to any even-numbered sequence set forth in SEQ ID NO: 1424 to SEQ ID NO: 1484.

[0023] The present invention also provides an engineered polynucleotide encoding at least one engineered polypeptide described in the above paragraphs. In some embodiments, the engineered polynucleotide comprises the odd-numbered sequences set forth in SEQ ID NO: 3 to SEQ ID NO: 1483.

[0024] The present invention further provides vectors comprising at least one engineered polynucleotide described above. In some embodiments, the vectors further comprise at least one control sequence.

[0025] The present invention also provides host cells comprising the vectors provided herein. In some embodiments, the host cell produces at least one engineered polypeptide provided herein.

[0026] The present invention further provides methods of producing an engineered nitroaldolase polypeptide, comprising the steps of culturing the host cell provided herein under conditions such that the engineered polynucleotide is expressed and the engineered polypeptide is produced. In some embodiments, the methods further comprise the step of recovering the engineered polypeptide.

### DESCRIPTION OF THE INVENTION

[0027] Unless defined otherwise, all technical and scientific terms used herein generally have the same meaning as commonly understood by one of ordinary skill in the art to which this invention pertains. Generally, the nomenclature used herein and the laboratory procedures of cell culture, molecular genetics, microbiology, organic chemistry, analytical chemistry and nucleic acid chemistry described below are those well-known and commonly employed in the art. Such techniques are well-known and described in numerous texts and reference works well known to those of skill in the art. Standard techniques, or modifications thereof, are used for chemical syntheses and chemical analyses. All patents, patent applications, articles and publications mentioned herein, both supra and infra, are hereby expressly incorporated herein by reference.

[0028] Although any suitable methods and materials similar or equivalent to those described herein find use in the practice of the present invention, some methods and materials are described herein. It is to be understood that this invention is not limited to the particular methodology, protocols, and reagents described, as these may vary, depending upon the context they are used by those of skill in the art. Accordingly, the terms defined immediately below are more fully described by reference to the invention as a whole.

[0029] It is to be understood that both the foregoing general description and the following detailed description are exemplary and explanatory only and are not restrictive of the present invention. The section headings used herein are for organizational purposes only and not to be construed as limiting the subject matter described. Numeric ranges are inclusive of the numbers defining the range. Thus, every numerical range disclosed herein is intended to encompass every narrower numerical range that falls within such broader numerical range, as if such narrower numerical ranges were all expressly written herein. It is also intended that every maximum (or minimum) numerical limitation disclosed herein includes every lower (or higher) numerical limitation, as if such lower (or higher) numerical limitations were expressly written herein.

[0030] As used in this specification and the appended claims, the singular forms “a”, “an” and “the” include plural referents unless the context clearly indicates otherwise. Thus, for example, reference to “a polypeptide” includes more than one polypeptide. Similarly, “comprise,” “comprises,” “comprising” “include,” “includes,” and “including” are interchangeable and not intended to be limiting.

[0031] It is to be understood that where descriptions of various embodiments use the term “comprising,” those skilled in the art would understand that in some specific instances, an embodiment can be alternatively described using language “consisting essentially of” or “consisting of” It is to be further understood that where descriptions of various embodiments use the term “optional” or “optionally” the subsequently described event or circumstance may or may not occur, and that the description includes instances where the event or circumstance occurs and instances in which it does not. It is to be understood that both the foregoing general description, and the following detailed description are exemplary and explanatory only and are not restrictive of this disclosure. The section headings used herein are for organizational purposes only and not to be construed as limiting the subject matter described. Abbreviations:

[0032] The abbreviations used for the genetically encoded amino acids are conventional and are as follows:

| Amino Acid | Three-Letter | One-Letter Abbreviation |
|---|---|---|
| Alanine | Ala | A |
| Arginine | Arg | R |
| Asparagine | Asn | N |
| Aspartate | Asp | D |
| Cysteine | Cys | C |
| Glutamate | Glu | E |
| Glutamine | Gln | Q |
| Glycine | Gly | G |
| Histidine | HIS | H |
| Isoleucine | Ile | I |
| Leucine | Leu | L |
| Lysine | Lys | K |
| Methionine | Met | M |
| Phenylalanine | Phe | F |
| Proline | Pro | P |
| Serine | Ser | S |
| Threonine | Thr | T |
| Tryptophan | Trp | W |
| Tyrosine | Tyr | Y |
| Valine | Val | V |

[0033] When the three-letter abbreviations are used, unless specifically preceded by an “L” or a “D” or clear from the context in which the abbreviation is used, the amino acid may be in either the L- or D-configuration about α-carbon (C_{α}). For example, whereas “Ala” designates alanine without specifying the configuration about the α-carbon, “D-Ala” and “L-Ala” designate D-alanine and L-alanine, respectively.

[0034] When the one-letter abbreviations are used, upper case letters designate amino acids in the L-configuration about the α-carbon and lower case letters designate amino acids in the D-configuration about the α-carbon. For example, “A” designates L-alanine and “a” designates D-alanine. When polypeptide sequences are presented as a string of one-letter or three-letter abbreviations (or mixtures thereof), the sequences are presented in the amino (N) to carboxy (C) direction in accordance with common convention.

[0035] The abbreviations used for the genetically encoding nucleosides are conventional and are as follows: adenosine (A); guanosine (G); cytidine (C); thymidine (T); and uridine (U). Unless specifically delineated, the abbreviated nucleotides may be either ribonucleosides or 2′-deoxyribonucleosides. The nucleosides may be specified as being either ribonucleosides or 2′-deoxyribonucleosides on an individual basis or on an aggregate basis. When nucleic acid sequences are presented as a string of one-letter abbreviations, the sequences are presented in the 5′ to 3′ direction in accordance with common convention, and the phosphates are not indicated.

### Definitions

[0036] In reference to the present invention, the technical and scientific terms used in the descriptions herein will have the meanings commonly understood by one of ordinary skill in the art, unless specifically defined otherwise. Accordingly, the following terms are intended to have the following meanings.

[0037] “EC” number refers to the Enzyme Nomenclature of the Nomenclature Committee of the International Union of Biochemistry and Molecular Biology (NC-IUBMB). The IUBMB biochemical classification is a numerical classification system for enzymes based on the chemical reactions they catalyze.

[0038] “ATCC” refers to the American Type Culture Collection whose biorepository collection includes genes and strains.

[0039] “NCBI” refers to National Center for Biological Information and the sequence databases provided therein.

[0040] “Protein,” “polypeptide,” and “peptide” are used interchangeably herein to denote a polymer of at least two amino acids covalently linked by an amide bond, regardless of length or post-translational modification (e.g., glycosylation, phosphorylation, lipidation, myristilation, ubiquitination, etc.). Included within this definition are D- and L-amino acids, and mixtures of D- and L-amino acids, as well as polymers comprising D- and L-amino acids, and mixtures of D- and L-amino acids.

[0041] “Amino acids” are referred to herein by either their commonly known three-letter symbols or by the one-letter symbols recommended by IUPAC-IUB Biochemical Nomenclature Commission. Nucleotides, likewise, may be referred to by their commonly accepted single letter codes.

[0042] As used herein, “polynucleotide” and “nucleic acid’ refer to two or more nucleosides that are covalently linked together. The polynucleotide may be wholly comprised of ribonucleotides (i.e., RNA), wholly comprised of 2′ deoxyribonucleotides (i.e., DNA), or comprised of mixtures of ribo- and 2′ deoxyribonucleotides. While the nucleosides will typically be linked together via standard phosphodiester linkages, the polynucleotides may include one or more non-standard linkages. The polynucleotide may be single-stranded or double-stranded, or may include both single-stranded regions and double-stranded regions. Moreover, while a polynucleotide will typically be composed of the naturally occurring encoding nucleobases (i.e., adenine, guanine, uracil, thymine and cytosine), it may include one or more modified and/or synthetic nucleobases, such as, for example, inosine, xanthine, hypoxanthine, etc. In some embodiments, such modified or synthetic nucleobases are nucleobases encoding amino acid sequences.

[0043] “Nitroaldolase”, “hydroxynitrile lyase” or “oxynitrilase” refers to an enzyme categorized under EC 4.1.2.47 having native activity in the interconversion of cyanohydrins to cyanide and corresponding aldehydes and ketones. These enzymes are also known to have activity as nitroaldolases, in the conversion of a nitroalkane and an aldehyde to a β-nitro alcohol. While the nitroaldolase enzymes of the present invention are derived from Baliospermum montanum, the present invention is not thus limited, and nitroaldolase enzymes may be derived from any suitable organism or created synthetically. Nitroaldolases, as used herein, include naturally occurring (wild-type) nitroaldolases, as well as non-naturally occurring engineered polypeptides generated by human manipulation.

[0044] “Coding sequence” refers to that portion of a nucleic acid (e.g., a gene) that encodes an amino acid sequence of a protein.

[0045] “Naturally-occurring” or “wild-type” refers to the form found in nature. For example, a naturally occurring or wild-type polypeptide or polynucleotide sequence is a sequence present in an organism that can be isolated from a source in nature and which has not been intentionally modified by human manipulation.

[0046] As used herein, “recombinant,” “engineered,” and “non-naturally occurring” when used with reference to a cell, nucleic acid, or polypeptide, refer to a material, or a material corresponding to the natural or native form of the material, that has been modified in a manner that would not otherwise exist in nature. In some embodiments, the cell, nucleic acid or polypeptide is identical a naturally occurring cell, nucleic acid or polypeptide, but is produced or derived from synthetic materials and/or by manipulation using recombinant techniques. Non-limiting examples include, among others, recombinant cells expressing genes that are not found within the native (non-recombinant) form of the cell or express native genes that are otherwise expressed at a different level.

[0047] “Percentage of sequence identity” and “percentage homology” are used interchangeably herein to refer to comparisons among polynucleotides or polypeptides, and are determined by comparing two optimally aligned sequences over a comparison window, wherein the portion of the polynucleotide or polypeptide sequence in the comparison window may comprise additions or deletions (i.e., gaps) as compared to the reference sequence for optimal alignment of the two sequences. The percentage may be calculated by determining the number of positions at which the identical nucleic acid base or amino acid residue occurs in both sequences to yield the number of matched positions, dividing the number of matched positions by the total number of positions in the window of comparison and multiplying the result by 100 to yield the percentage of sequence identity. Alternatively, the percentage may be calculated by determining the number of positions at which either the identical nucleic acid base or amino acid residue occurs in both sequences or a nucleic acid base or amino acid residue is aligned with a gap to yield the number of matched positions, dividing the number of matched positions by the total number of positions in the window of comparison and multiplying the result by 100 to yield the percentage of sequence identity. Those of skill in the art appreciate that there are many established algorithms available to align two sequences. Optimal alignment of sequences for comparison can be conducted, e.g., by the local homology algorithm of Smith and Waterman (Smith and Waterman, Adv. Appl. Math., 2:482 [1981]), by the homology alignment algorithm of Needleman and Wunsch (Needleman and Wunsch, J. Mol. Biol., 48:443 [1970]), by the search for similarity method of Pearson and Lipman (Pearson and Lipman, Proc. Natl. Acad. Sci. USA 85:2444 [1988]), by computerized implementations of these algorithms (e.g., GAP, BESTFIT, FASTA, and TFASTA in the GCG Wisconsin Software Package), or by visual inspection, as known in the art. Examples of algorithms that are suitable for determining percent sequence identity and sequence similarity include, but are not limited to the BLAST and BLAST 2.0 algorithms, which are described by Altschul et al. (See, Altschul et al., J. Mol. Biol., 215: 403-410 [1990]; and Altschul et al., Nucl. Acids Res., 3389-3402 [1977], respectively). Software for performing BLAST analyses is publicly available through the National Center for Biotechnology Information website. This algorithm involves first identifying high scoring sequence pairs (HSPs) by identifying short words of length W in the query sequence, which either match or satisfy some positive-valued threshold score T when aligned with a word of the same length in a database sequence. T is referred to as, the neighborhood word score threshold (Altschul et al., supra). These initial neighborhood word hits act as seeds for initiating searches to find longer HSPs containing them. The word hits are then extended in both directions along each sequence for as far as the cumulative alignment score can be increased. Cumulative scores are calculated using, for nucleotide sequences, the parameters M (reward score for a pair of matching residues; always >0) and N (penalty score for mismatching residues; always <0). For amino acid sequences, a scoring matrix is used to calculate the cumulative score. Extension of the word hits in each direction are halted when: the cumulative alignment score falls off by the quantity X from its maximum achieved value; the cumulative score goes to zero or below, due to the accumulation of one or more negative-scoring residue alignments; or the end of either sequence is reached. The BLAST algorithm parameters W, T, and X determine the sensitivity and speed of the alignment. The BLASTN program (for nucleotide sequences) uses as defaults a wordlength (W) of 11, an expectation (E) of 10, M=5, N=−4, and a comparison of both strands. For amino acid sequences, the BLASTP program uses as defaults a wordlength (W) of 3, an expectation (E) of 10, and the BLOSUM62 scoring matrix (See, Henikoff and Henikoff, Proc. Natl. Acad. Sci. USA 89:10915 [1989]). Exemplary determination of sequence alignment and % sequence identity can employ the BESTFIT or GAP programs in the GCG Wisconsin Software package (Accelrys, Madison WI), using default parameters provided.

[0048] “Reference sequence” refers to a defined sequence used as a basis for a sequence comparison. A reference sequence may be a subset of a larger sequence, for example, a segment of a full-length gene or polypeptide sequence. Generally, a reference sequence is at least 20 nucleotide or amino acid residues in length, at least 25 residues in length, at least 50 residues in length, or the full length of the nucleic acid or polypeptide. Since two polynucleotides or polypeptides may each (1) comprise a sequence (i.e., a portion of the complete sequence) that is similar between the two sequences, and (2) may further comprise a sequence that is divergent between the two sequences, sequence comparisons between two (or more) polynucleotides or polypeptide are typically performed by comparing sequences of the two polynucleotides or polypeptides over a “comparison window” to identify and compare local regions of sequence similarity. In some embodiments, a “reference sequence” can be based on a primary amino acid sequence, where the reference sequence is a sequence that can have one or more changes in the primary sequence. For instance, a “reference sequence based on SEQ ID NO: 4 having at the residue corresponding to X14 a valine” or X14V refers to a reference sequence in which the corresponding residue at X14 in SEQ ID NO: 4, which is a tyrosine, has been changed to valine.

[0049] “Comparison window” refers to a conceptual segment of at least about 20 contiguous nucleotide positions or amino acids residues wherein a sequence may be compared to a reference sequence of at least 20 contiguous nucleotides or amino acids and wherein the portion of the sequence in the comparison window may comprise additions or deletions (i.e., gaps) of 20 percent or less as compared to the reference sequence (which does not comprise additions or deletions) for optimal alignment of the two sequences. The comparison window can be longer than 20 contiguous residues, and includes, optionally 30, 40, 50, 100, or longer windows.

[0050] As used herein, “substantial identity” refers to a polynucleotide or polypeptide sequence that has at least 80 percent sequence identity, at least 85 percent identity, at least between 89 to 95 percent sequence identity, or more usually, at least 99 percent sequence identity as compared to a reference sequence over a comparison window of at least 20 residue positions, frequently over a window of at least 30-50 residues, wherein the percentage of sequence identity is calculated by comparing the reference sequence to a sequence that includes deletions or additions which total 20 percent or less of the reference sequence over the window of comparison. In some specific embodiments applied to polypeptides, the term “substantial identity” means that two polypeptide sequences, when optimally aligned, such as by the programs GAP or BESTFIT using default gap weights, share at least 80 percent sequence identity, preferably at least 89 percent sequence identity, at least 95 percent sequence identity or more (e.g., 99 percent sequence identity). In some embodiments, residue positions that are not identical in sequences being compared differ by conservative amino acid substitutions.

[0051] “Corresponding to,” “reference to,” and “relative to” when used in the context of the numbering of a given amino acid or polynucleotide sequence refer to the numbering of the residues of a specified reference sequence when the given amino acid or polynucleotide sequence is compared to the reference sequence. In other words, the residue number or residue position of a given polymer is designated with respect to the reference sequence rather than by the actual numerical position of the residue within the given amino acid or polynucleotide sequence. For example, a given amino acid sequence, such as that of an engineered nitroaldolase, can be aligned to a reference sequence by introducing gaps to optimize residue matches between the two sequences. In these cases, although the gaps are present, the numbering of the residue in the given amino acid or polynucleotide sequence is made with respect to the reference sequence to which it has been aligned.

[0052] “Amino acid difference” or “residue difference” refers to a change in the amino acid residue at a position of a polypeptide sequence relative to the amino acid residue at a corresponding position in a reference sequence. The positions of amino acid differences generally are referred to herein as “Xn,” where n refers to the corresponding position in the reference sequence upon which the residue difference is based. For example, a “residue difference at position X25 as compared to SEQ ID NO: 2” refers to a change of the amino acid residue at the polypeptide position corresponding to position 25 of SEQ ID NO: 2. Thus, if the reference polypeptide of SEQ ID NO: 2 has a valine at position 25, then a “residue difference at position X25 as compared to SEQ ID NO: 2” an amino acid substitution of any residue other than valine at the position of the polypeptide corresponding to position 25 of SEQ ID NO: 2. In most instances herein, the specific amino acid residue difference at a position is indicated as “XnY” where “Xn” specified the corresponding position as described above, and “Y” is the single letter identifier of the amino acid found in the engineered polypeptide (i.e., the different residue than in the reference polypeptide). In some embodiments, more than one amino acid can appear in a specified residue position (i.e., the alternative amino acids can be listed in the form XnY/Z, where Y and Z represent alternate amino acid residues). In some instances (e.g., in Tables 2-1, 2-2, 3-1, 3-2, 4-1, 4-2, 5-1, 5-2, 6-1, 6-2, 7-1, and 7-2) the present invention also provides specific amino acid differences denoted by the conventional notation “AnB”, where A is the single letter identifier of the residue in the reference sequence, “n” is the number of the residue position in the reference sequence, and B is the single letter identifier of the residue substitution in the sequence of the engineered polypeptide. Furthermore, in some instances, a polypeptide of the present invention can include one or more amino acid residue differences relative to a reference sequence, which is indicated by a list of the specified positions where changes are made relative to the reference sequence. In some additional embodiments, the present invention provides engineered polypeptide sequences comprising both conservative and non-conservative amino acid substitutions. As used herein, “conservative amino acid substitution” refers to a substitution of a residue with a different residue having a similar side chain, and thus typically involves substitution of the amino acid in the polypeptide with amino acids within the same or similar defined class of amino acids. By way of example and not limitation, an amino acid with an aliphatic side chain is substituted with another aliphatic amino acid (e.g., alanine, valine, leucine, and isoleucine); an amino acid with an hydroxyl side chain is substituted with another amino acid with a hydroxyl side chain (e.g., serine and threonine); an amino acid having aromatic side chains is substituted with another amino acid having an aromatic side chain (e.g., phenylalanine, tyrosine, tryptophan, and histidine); an amino acid with a basic side chain is substituted with another amino acid with a basis side chain (e.g., lysine and arginine); an amino acid with an acidic side chain is substituted with another amino acid with an acidic side chain (e.g., aspartic acid or glutamic acid); and/or a hydrophobic or hydrophilic amino acid is replaced with another hydrophobic or hydrophilic amino acid, respectively. Exemplary conservative substitutions are provided in Table 1 below.

TABLE 1
Conservative Amino Acid Substitution Examples

| Residue | Possible Conservative Substitutions |
|---|---|
| A, L, V, I | Other aliphatic (A, L, V, I) |
| | Other non-polar (A, L, V, I, G, M) |
| G, M | Other non-polar (A, L, V, I, G, M) |
| D, E | Other acidic (D, E) |
| K, R | Other basic (K, R) |
| N, Q, S, T | Other polar |
| H, Y, W, F | Other aromatic (H, Y, W, F) |
| C, P | None |

[0053] “Non-conservative substitution” refers to substitution of an amino acid in the polypeptide with an amino acid with significantly differing side chain properties. Non-conservative substitutions may use amino acids between, rather than within, the defined groups and affects (a) the structure of the peptide backbone in the area of the substitution (e.g., proline for glycine), (b) the charge or hydrophobicity, or (c) the bulk of the side chain. By way of example and not limitation, an exemplary non-conservative substitution can be an acidic amino acid substituted with a basic or aliphatic amino acid; an aromatic amino acid substituted with a small amino acid; and a hydrophilic amino acid substituted with a hydrophobic amino acid.

[0054] “Deletion” refers to modification to the polypeptide by removal of one or more amino acids from the reference polypeptide. Deletions can comprise removal of 1 or more amino acids, 2 or more amino acids, 5 or more amino acids, 10 or more amino acids, 15 or more amino acids, or 20 or more amino acids, up to 10% of the total number of amino acids, or up to 20% of the total number of amino acids making up the reference enzyme while retaining enzymatic activity and/or retaining the improved properties of an engineered nitroaldolase enzyme. Deletions can be directed to the internal portions and/or terminal portions of the polypeptide. In various embodiments, the deletion can comprise a continuous segment or can be discontinuous.

[0055] “Insertion” refers to modification to the polypeptide by addition of one or more amino acids from the reference polypeptide. In some embodiments, the improved engineered nitroaldolase enzymes comprise insertions of one or more amino acids to the naturally occurring nitroaldolase polypeptide as well as insertions of one or more amino acids to other improved nitroaldolase polypeptides. Insertions can be in the internal portions of the polypeptide, or to the carboxy or amino terminus. Insertions as used herein include fusion proteins as is known in the art. The insertion can be a contiguous segment of amino acids or separated by one or more of the amino acids in the naturally occurring polypeptide.

[0056] “Fragment” as used herein refers to a polypeptide that has an amino-terminal and/or carboxy-terminal deletion, but where the remaining amino acid sequence is identical to the corresponding positions in the sequence. Fragments can be at least 14 amino acids long, at least 20 amino acids long, at least 50 amino acids long or longer, and up to 70%, 80%, 90%, 95%, 98%, and 99% of the full-length nitroaldolase polypeptide, for example the polypeptide of SEQ ID NO: 4 or a nitroaldolase polypeptide provided in the even-numbered sequences of SEQ ID NOs: 4-1484.

[0057] “Isolated polypeptide” refers to a polypeptide which is substantially separated from other contaminants that naturally accompany it, e.g., protein, lipids, and polynucleotides. The term embraces polypeptides which have been removed or purified from their naturally-occurring environment or expression system (e.g., host cell or in vitro synthesis). The engineered nitroaldolase enzymes may be present within a cell, present in the cellular medium, or prepared in various forms, such as lysates or isolated preparations. As such, in some embodiments, the engineered nitroaldolase enzyme can be an isolated polypeptide.

[0058] “Substantially pure polypeptide” refers to a composition in which the polypeptide species is the predominant species present (i.e., on a molar or weight basis it is more abundant than any other individual macromolecular species in the composition), and is generally a substantially purified composition when the object species comprises at least about 50 percent of the macromolecular species present by mole or % weight. Generally, a substantially pure nitroaldolase composition will comprise about 60% or more, about 70% or more, about 80% or more, about 90% or more, about 95% or more, and about 98% or more of all macromolecular species by mole or % weight present in the composition. In some embodiments, the object species is purified to essential homogeneity (i.e., contaminant species cannot be detected in the composition by conventional detection methods) wherein the composition consists essentially of a single macromolecular species. Solvent species, small molecules (<500 Daltons), and elemental ion species are not considered macromolecular species. In some embodiments, the isolated engineered nitroaldolase polypeptide is a substantially pure polypeptide composition.

[0059] “Stereoselective” refers to a preference for formation of one stereoisomer over another in a chemical or enzymatic reaction. Stereoselectivity can be partial, where the formation of one stereoisomer is favored over the other, or it may be complete where only one stereoisomer is formed. When the stereoisomers are enantiomers, the stereoselectivity is referred to as enantioselectivity, the fraction (typically reported as a percentage) of one enantiomer in the sum of both. It is commonly alternatively reported in the art (typically as a percentage) as the enantiomeric excess (e.e.) calculated therefrom according to the formula [major enantiomer−minor enantiomer]/[major enantiomer+minor enantiomer]. Where the stereoisomers are diastereoisomers, the stereoselectivity is referred to as diastereoselectivity, the fraction (typically reported as a percentage) of one diastereomer in a mixture of two diastereomers, commonly alternatively reported as the diastereomeric excess (d.e.). Enantiomeric excess and diastereomeric excess are types of stereomeric excess.

[0060] “Highly stereoselective” refers to a chemical or enzymatic reaction that is capable of converting a substrate or substrates (e.g., substrate compounds (2) and (3)), to the corresponding amine product (e.g., Compound (1)), with at least about 85% stereomeric excess.

[0061] As used herein, “improved enzyme property” refers to at least one improved property of an enzyme. In some embodiments, the present invention provides engineered nitroaldolase polypeptides that exhibit an improvement in any enzyme property as compared to a reference nitroaldolase polypeptide and/or a nitroaldolase polypeptide, and/or another engineered nitroaldolase polypeptide. For the engineered nitroaldolase polypeptides described herein, the comparison is generally made to the parent enzyme from which the nitroaldolase is derived, although in some embodiments, the reference enzyme can be another improved engineered nitroaldolase. Thus, the level of “improvement” can be determined and compared between various nitroaldolase polypeptides, including wild-type, as well as engineered nitroaldolases. Improved properties include, but are not limited, to such properties as enzymatic activity (which can be expressed in terms of percent conversion of the substrate), thermo stability, solvent stability, pH activity profile, cofactor requirements, refractoriness to inhibitors (e.g., substrate or product inhibition), stereospecificity, and/or stereoselectivity (including enantioselectivity).

[0062] “Increased enzymatic activity” refers to an improved property of the engineered nitroaldolase polypeptides, which can be represented by an increase in specific activity (e.g., product produced/time/weight protein) or an increase in percent conversion of the substrate to the product (e.g., percent conversion of starting amount of substrate to product in a specified time period using a specified amount of nitroaldolase) as compared to the reference nitroaldolase enzyme. Exemplary methods to determine enzyme activity are provided in the Examples. Any property relating to enzyme activity may be affected, including the classical enzyme properties of Kₘ, Vₘₐₓ or k_{cat}, changes of which can lead to increased enzymatic activity. Improvements in enzyme activity can be from about 1.2 times the enzymatic activity of the corresponding parent enzyme, to as much as 2 times, 5 times, 10 times, 20 times, 25 times, 50 times or more enzymatic activity than the naturally occurring or another engineered nitroaldolase from which the nitroaldolase polypeptides were derived. Nitroaldolase activity can be measured by any one of standard assays, such as by monitoring changes in properties of substrates, cofactors, or products. In some embodiments, the amount of products generated can be measured by Gas Chromatography (GC). Comparisons of enzyme activities are made using a defined preparation of enzyme, a defined assay under a set condition, and one or more defined substrates, as further described in detail herein. Generally, when lysates are compared, the numbers of cells and the amount of protein assayed are determined as well as use of identical expression systems and identical host cells to minimize variations in amount of enzyme produced by the host cells and present in the lysates.

[0063] “Conversion” refers to the enzymatic conversion of the substrate(s) to the corresponding product(s). “Percent conversion” refers to the percent of the substrate that is converted to the product within a period of time under specified conditions. Thus, the “enzymatic activity” or “activity” of a nitroaldolase polypeptide can be expressed as “percent conversion” of the substrate to the product.

[0064] “Thermostable” refers to a nitroaldolase polypeptide that maintains similar activity (more than 60% to 80% for example) after exposure to elevated temperatures (e.g., 40-80° C.) for a period of time (e.g., 0.5-24 hrs) compared to the parent enzyme exposed to the same elevated temperature.

[0065] “Solvent stable” refers to a nitroaldolase polypeptide that maintains similar activity (more than e.g., 60% to 80%) after exposure to varying concentrations (e.g., 5-99%) of solvent (ethanol, isopropyl alcohol, dimethylsulfoxide (DMSO), tetrahydrofuran, 2-methyltetrahydrofuran, acetone, toluene, butyl acetate, methyl tert-butyl ether, etc.) for a period of time (e.g., 0.5-24 hrs) compared to the parent enzyme exposed to the same concentration of the same solvent.

[0066] “Thermo- and solvent stable” refers to a nitroaldolase polypeptide that is both thermostable and solvent stable.

[0067] The term “stringent hybridization conditions” is used herein to refer to conditions under which nucleic acid hybrids are stable. As known to those of skill in the art, the stability of hybrids is reflected in the melting temperature (Tₘ) of the hybrids. In general, the stability of a hybrid is a function of ion strength, temperature, G/C content, and the presence of chaotropic agents. The Tₘ values for polynucleotides can be calculated using known methods for predicting melting temperatures (See e.g., Baldino et al., Meth. Enzymol., 168:761-777 [1989]; Bolton et al., Proc. Natl. Acad. Sci. USA 48:1390 [1962]; Bresslauer et al., Proc. Natl. Acad. Sci. USA 83:8893-8897 [1986]; Freier et al., Proc. Natl. Acad. Sci. USA 83:9373-9377 [1986]; Kierzek et al., Biochem., 25:7840-7846 [1986]; Rychlik et al., 1990, Nucl. Acids Res., 18:6409-6412 [1990](erratum, Nucl. Acids Res., 19:698 [1991]); Sambrook et al., supra); Suggs et al., 1981, in Developmental Biology Using Purified Genes, Brown et al. [eds.], pp. 683-693, Academic Press, Cambridge, MA [1981]; and Wetmur, Crit. Rev. Biochem. Mol. Biol., 26:227-259 [1991]). In some embodiments, the polynucleotide encodes the polypeptide disclosed herein and hybridizes under defined conditions, such as moderately stringent or highly stringent conditions, to the complement of a sequence encoding an engineered nitroaldolase enzyme of the present invention.

[0068] “Hybridization stringency” relates to hybridization conditions, such as washing conditions, in the hybridization of nucleic acids. Generally, hybridization reactions are performed under conditions of lower stringency, followed by washes of varying but higher stringency. The term “moderately stringent hybridization” refers to conditions that permit target-DNA to bind a complementary nucleic acid that has about 60% identity, preferably about 75% identity, about 85% identity to the target DNA, with greater than about 90% identity to target-polynucleotide. Exemplary moderately stringent conditions are conditions equivalent to hybridization in 50% formamide, 5×Denhart's solution, 5×SSPE, 0.2% SDS at 42° C., followed by washing in 0.2×SSPE, 0.2% SDS, at 42° C. “High stringency hybridization” refers generally to conditions that are about 10° C. or less from the thermal melting temperature T, as determined under the solution condition for a defined polynucleotide sequence. In some embodiments, a high stringency condition refers to conditions that permit hybridization of only those nucleic acid sequences that form stable hybrids in 0.018 M NaCl at 65° C. (i.e., if a hybrid is not stable in 0.018 M NaCl at 65° C., it will not be stable under high stringency conditions, as contemplated herein). High stringency conditions can be provided, for example, by hybridization in conditions equivalent to 50% formamide, 5×Denhart's solution, 5×SSPE, 0.2% SDS at 42° C., followed by washing in 0.1×SSPE, and 0.1% SDS at 65° C. Another high stringency condition is hybridizing in conditions equivalent to hybridizing in 5×SSC containing 0.1% (w:v) SDS at 65° C. and washing in 0.1×SSC containing 0.1% SDS at 65° C. Other high stringency hybridization conditions, as well as moderately stringent conditions, are described in the references cited above.

[0069] “Heterologous” polynucleotide refers to any polynucleotide that is introduced into a host cell by laboratory techniques, and includes polynucleotides that are removed from a host cell, subjected to laboratory manipulation, and then reintroduced into a host cell.

[0070] “Codon optimized” refers to changes in the codons of the polynucleotide encoding a protein to those preferentially used in a particular organism such that the encoded protein is efficiently expressed in the organism of interest. Although the genetic code is degenerate in that most amino acids are represented by several codons, called “synonyms” or “synonymous” codons, it is well known that codon usage by particular organisms is nonrandom and biased towards particular codon triplets. This codon usage bias may be higher in reference to a given gene, genes of common function or ancestral origin, highly expressed proteins versus low copy number proteins, and the aggregate protein coding regions of an organism's genome. In some embodiments, the polynucleotides encoding the nitroaldolase enzymes may be codon optimized for optimal production from the host organism selected for expression.

[0071] As used herein, “preferred, optimal, high codon usage bias codons” refers interchangeably to codons that are used at higher frequency in the protein coding regions than other codons that code for the same amino acid. The preferred codons may be determined in relation to codon usage in a single gene, a set of genes of common function or origin, highly expressed genes, the codon frequency in the aggregate protein coding regions of the whole organism, codon frequency in the aggregate protein coding regions of related organisms, or combinations thereof. Codons whose frequency increases with the level of gene expression are typically optimal codons for expression. A variety of methods are known for determining the codon frequency (e.g., codon usage, relative synonymous codon usage) and codon preference in specific organisms, including multivariate analysis, for example, using cluster analysis or correspondence analysis, and the effective number of codons used in a gene (See e.g., GCG CodonPreference, Genetics Computer Group Wisconsin Package; CodonW, Peden, University of Nottingham; McInerney, Bioinform., 14:372-73 [1998]; Stenico et al., Nucl. Acids Res., 222437-46 [1994]; Wright, Gene 87:23-29 [1990]). Codon usage tables are available for many different organisms (See e.g., Wada et al., Nucl. Acids Res., 20:2111-2118 [1992]; Nakamura et al., Nucl. Acids Res., 28:292 [2000]; Duret, et al., supra; Henaut and Danchin, in Escherichia coli and Salmonella, Neidhardt, et al. (eds.), ASM Press, Washington D.C., p. 2047-2066 [1996]). The data source for obtaining codon usage may rely on any available nucleotide sequence capable of coding for a protein. These data sets include nucleic acid sequences actually known to encode expressed proteins (e.g., complete protein coding sequences-CDS), expressed sequence tags (ESTS), or predicted coding regions of genomic sequences (See e.g., Mount, Bioinformatics: Sequence and Genome Analysis, Chapter 8, Cold Spring Harbor Laboratory Press, Cold Spring Harbor, N.Y. [2001]; Uberbacher, Meth. Enzymol., 266:259-281 [1996]; and Tiwari et al., Comput. Appl. Biosci., 13:263-270 [1997]).

[0072] “Control sequence” is defined herein to include all components, which are necessary or advantageous for the expression of a polynucleotide and/or polypeptide of the present invention. Each control sequence may be native or foreign to the nucleic acid sequence encoding the polypeptide. Such control sequences include, but are not limited to, a leader, polyadenylation sequence, propeptide sequence, promoter, signal peptide sequence, and transcription terminator. At a minimum, the control sequences include a promoter, and transcriptional and translational stop signals. The control sequences may be provided with linkers for the purpose of introducing specific restriction sites facilitating ligation of the control sequences with the coding region of the nucleic acid sequence encoding a polypeptide.

[0073] “Operably linked” is defined herein as a configuration in which a control sequence is appropriately placed (i.e., in a functional relationship) at a position relative to a polynucleotide of interest such that the control sequence directs or regulates the expression of the polynucleotide and/or polypeptide of interest.

[0074] “Promoter sequence” refers to a nucleic acid sequence that is recognized by a host cell for expression of a polynucleotide of interest, such as a coding sequence. The promoter sequence contains transcriptional control sequences, which mediate the expression of a polynucleotide of interest. The promoter may be any nucleic acid sequence which shows transcriptional activity in the host cell of choice including mutant, truncated, and hybrid promoters, and may be obtained from genes encoding extracellular or intracellular polypeptides either homologous or heterologous to the host cell.

[0075] “Suitable reaction conditions” refer to those conditions in the biocatalytic reaction solution (e.g., ranges of enzyme loading, substrate loading, cofactor loading, temperature, pH, buffers, co-solvents, etc.) under which the nitroaldolase polypeptide of the present invention is capable of converting one or more substrate compounds to a product compound (e.g., conversion of compound (1) and compound (2) to compound (3), as shown in Scheme 1). Exemplary “suitable reaction conditions” are provided in the present invention and illustrated by the Examples.

[0076] “Composition” refers to a mixture or combination of one or more substances, wherein each substance or component of the composition retains its individual properties. As used herein, a biocatalytic composition refers to a combination of one or more substances useful for biocatalysis.

[0077] “Loading”, such as in “compound loading” or “enzyme loading” or “cofactor loading” refers to the concentration or amount of a component in a reaction mixture at the start of the reaction.

[0078] “Substrate” in the context of a biocatalyst mediated process refers to the compound or molecule acted on by the biocatalyst. For example, compound (1) and compound (2) are substrates for a nitroaldolase.

[0079] “Product” in the context of a biocatalyst mediated process refers to the compound or molecule resulting from the action of the biocatalyst. For example, compound (3) is a product of the nitroaldolase-mediated conversion of compound (1) and compound (2).

[0080] “Alkyl” refers to saturated hydrocarbon groups of from 1 to 18 carbon atoms inclusively, either straight chained or branched, more preferably from 1 to 8 carbon atoms inclusively, and most preferably 1 to 6 carbon atoms inclusively. An alkyl with a specified number of carbon atoms is denoted in parenthesis (e.g., (C₁-C₆)alkyl refers to an alkyl of 1 to 6 carbon atoms).

[0081] “Alkenyl” refers to hydrocarbon groups of from 2 to 12 carbon atoms inclusively, either straight or branched containing at least one double bond but optionally containing more than one double bond.

[0082] “Alkynyl” refers to hydrocarbon groups of from 2 to 12 carbon atoms inclusively, either straight or branched containing at least one triple bond but optionally containing more than one triple bond, and additionally optionally containing one or more double bonded moieties.

[0083] “Alkylene” refers to a straight or branched chain divalent hydrocarbon radical having from 1 to 18 carbon atoms inclusively, more preferably from 1 to 8 carbon atoms inclusively, and most preferably 1 to 6 carbon atoms inclusively, optionally substituted with one or more suitable substituents. Exemplary “alkylenes” include, but are not limited to, methylene, ethylene, propylene, butylene, and the like.

[0084] “Alkenylene” refers to a straight or branched chain divalent hydrocarbon radical having 2 to 12 carbon atoms inclusively and one or more carbon-carbon double bonds, more preferably from 2 to 8 carbon atoms inclusively, and most preferably 2 to 6 carbon atoms inclusively, optionally substituted with one or more suitable substituents.

[0085] “Heteroalkyl, “heteroalkenyl,” and heteroalkynyl,” refer respectively, to alkyl, alkenyl and alkynyl as defined herein in which one or more of the carbon atoms are each independently replaced with the same or different heteroatoms or heteroatomic groups. Heteroatoms and/or heteroatomic groups which can replace the carbon atoms include, but are not limited to, —O—, —S—, —S—O—, —NR^{γ}—, —PH—, —S(O)—, —S(O)₂—, —S(O)NR^{γ}—, —S(O)₂NR^{γ}—, and the like, including combinations thereof, where each Rr is independently selected from hydrogen, alkyl, cycloalkyl, heterocycloalkyl, aryl, and heteroaryl.

[0086] “Aryl” refers to an unsaturated aromatic carbocyclic group of from 6 to 12 carbon atoms inclusively having a single ring (e.g., phenyl) or multiple condensed rings (e.g., naphthyl or anthryl). Exemplary aryls include phenyl, pyridyl, naphthyl and the like.

[0087] “Arylalkyl” refers to an alkyl substituted with an aryl (i.e., aryl-alkyl- groups), preferably having from 1 to 6 carbon atoms inclusively in the alkyl moiety and from 6 to 12 carbon atoms inclusively in the aryl moiety. Such arylalkyl groups are exemplified by benzyl, phenethyl and the like.

[0088] “Aryloxy” refers to —OR^{γ} groups, where R^{γ} is an aryl group, which can be optionally substituted.

[0089] “Cycloalkyl” refers to cyclic alkyl groups of from 3 to 12 carbon atoms inclusively having a single cyclic ring or multiple condensed rings which can be optionally substituted with from 1 to 3 alkyl groups. Exemplary cycloalkyl groups include, but are not limited to, single ring structures such as cyclopropyl, cyclobutyl, cyclopentyl, cyclooctyl, 1-methylcyclopropyl, 2-methylcyclopentyl, 2-methylcyclooctyl, and the like, or multiple ring structures, including bridged ring systems, such as adamantyl, and the like.

[0090] “Cycloalkylalkyl” refers to an alkyl substituted with a cycloalkyl (i.e., cycloalkyl-alkyl- groups), preferably having from 1 to 6 carbon atoms inclusively in the alkyl moiety and from 3 to 12 carbon atoms inclusively in the cycloalkyl moiety. Such cycloalkylalkyl groups are exemplified by cyclopropylmethyl, cyclohexylethyl and the like.

[0091] “Amino” refers to the group —NH₂. Substituted amino refers to the group —NHR^{η}, NR^{η}R^{η}, and NR^{η}R^{η}R^{η}, where each R^{η} is independently selected from substituted or unsubstituted alkyl, cycloalkyl, cycloheteroalkyl, alkoxy, aryl, heteroaryl, heteroarylalkyl, acyl, alkoxycarbonyl, sulfanyl, sulfinyl, sulfonyl, and the like. Typical amino groups include, but are limited to, dimethylamino, diethylamino, trimethylammonium, triethylammonium, methylysulfonylamino, furanyl-oxy-sulfamino, and the like.

[0092] “Aminoalkyl” refers to an alkyl group in which one or more of the hydrogen atoms are replaced with one or more amino groups, including substituted amino groups.

[0093] “Aminocarbonyl” refers to —C(O)NH₂. Substituted aminocarbonyl refers to —C(O)NR^{η}R^{η}, where the amino group NR^{η}R^{η} is as defined herein.

[0094] “Oxy” refers to a divalent group —O—, which may have various substituents to form different oxy groups, including ethers and esters.

[0095] “Alkoxy” or “alkyloxy” are used interchangeably herein to refer to the group —OR^{ζ}, wherein R^{ζ} is an alkyl group, including optionally substituted alkyl groups.

[0096] “Carboxy” refers to —COOH.

[0097] “Carbonyl” refers to —C(O)—, which may have a variety of substituents to form different carbonyl groups including acids, acid halides, aldehydes, amides, esters, and ketones.

[0098] “Carboxyalkyl” refers to an alkyl in which one or more of the hydrogen atoms are replaced with one or more carboxy groups.

[0099] “Aminocarbonylalkyl” refers to an alkyl substituted with an aminocarbonyl group, as defined herein.

[0100] “Halogen” or “halo” refers to fluoro, chloro, bromo and iodo.

[0101] “Haloalkyl” refers to an alkyl group in which one or more of the hydrogen atoms are replaced with a halogen. Thus, the term “haloalkyl” is meant to include monohaloalkyls, dihaloalkyls, trihaloalkyls, etc. up to perhaloalkyls. For example, the expression “(C₁-C₂) haloalkyl” includes 1-fluoromethyl, difluoromethyl, trifluoromethyl, 1-fluoroethyl, 1,1-difluoroethyl, 1,2-difluoroethyl, 1,1,1 trifluoroethyl, perfluoroethyl, etc.

[0102] “Hydroxy” refers to —OH.

[0103] “Hydroxyalkyl” refers to an alkyl group in which in which one or more of the hydrogen atoms are replaced with one or more hydroxy groups.

[0104] “Thiol” or “sulfanyl” refers to —SH. Substituted thiol or sulfanyl refers to —S—R^{η}, where R^{η} is an alkyl, aryl or other suitable substituent.

[0105] “Alkylthio” refers to —SR^{ζ}, where R^{ζ} is an alkyl, which can be optionally substituted. Typical alkylthio group include, but are not limited to, methylthio, ethylthio, n-propylthio, and the like.

[0106] “Alkylthioalkyl” refers to an alkyl substituted with an alkylthio group, —SR^{ζ}, where R^{ζ} is an alkyl, which can be optionally substituted.

[0107] “Sulfonyl” refers to —SO₂—. Substituted sulfonyl refers to —SO₂—R^{η}, where Rη is an alkyl, aryl or other suitable substituent.

[0108] “Alkylsulfonyl” refers to —SO₂—R^{ζ}, where R^{ζ} is an alkyl, which can be optionally substituted. Typical alkylsulfonyl groups include, but are not limited to, methylsulfonyl, ethylsulfonyl, n-propylsulfonyl, and the like.

[0109] “Alkylsulfonylalkyl” refers to an alkyl substituted with an alkylsulfonyl group, —SO₂—R^{ζ}, where R^{ζ} is an alkyl, which can be optionally substituted.

[0110] “Heteroaryl” refers to an aromatic heterocyclic group of from 1 to 10 carbon atoms inclusively and 1 to 4 heteroatoms inclusively selected from oxygen, nitrogen and sulfur within the ring. Such heteroaryl groups can have a single ring (e.g., pyridyl or furyl) or multiple condensed rings (e.g., indolizinyl or benzothienyl).

[0111] “Heteroarylalkyl” refers to an alkyl substituted with a heteroaryl (i.e., heteroaryl-alkyl- groups), preferably having from 1 to 6 carbon atoms inclusively in the alkyl moiety and from 5 to 12 ring atoms inclusively in the heteroaryl moiety. Such heteroarylalkyl groups are exemplified by pyridylmethyl and the like.

[0112] “Heterocycle”, “heterocyclic” and interchangeably “heterocycloalkyl” refer to a saturated or unsaturated group having a single ring or multiple condensed rings, from 2 to 10 carbon ring atoms inclusively and from 1 to 4 hetero ring atoms inclusively selected from nitrogen, sulfur or oxygen within the ring. Such heterocyclic groups can have a single ring (e.g., piperidinyl or tetrahydrofuryl) or multiple condensed rings (e.g., indolinyl, dihydrobenzofuran or quinuclidinyl). Examples of heterocycles include, but are not limited to, furan, thiophene, thiazole, oxazole, pyrrole, imidazole, pyrazole, pyridine, pyrazine, pyrimidine, pyridazine, indolizine, isoindole, indole, indazole, purine, quinolizine, isoquinoline, quinoline, phthalazine, naphthylpyridine, quinoxaline, quinazoline, cinnoline, pteridine, carbazole, carboline, phenanthridine, acridine, phenanthroline, isothiazole, phenazine, isoxazole, phenoxazine, phenothiazine, imidazolidine, imidazoline, piperidine, piperazine, pyrrolidine, indoline and the like.

[0113] “Heterocycloalkylalkyl” refers to an alkyl substituted with a heterocycloalkyl (i.e., heterocycloalkyl-alkyl- groups), preferably having from 1 to 6 carbon atoms inclusively in the alkyl moiety and from 3 to 12 ring atoms inclusively in the heterocycloalkyl moiety.

[0114] “Membered ring” is meant to embrace any cyclic structure. The number preceding the term “membered” denotes the number of skeletal atoms that constitute the ring. Thus, for example, cyclohexyl, pyridine, pyran and thiopyran are 6-membered rings and cyclopentyl, pyrrole, furan, and thiophene are 5-membered rings.

[0115] “Fused bicyclic ring” as used herein refers to both unsubstituted and substituted carbocyclic and/or heterocyclic ring moieties having 5 to 8 atoms in each ring, the rings having 2 common atoms.

[0116] “Optionally substituted” as used herein with respect to the foregoing chemical groups means that positions of the chemical group occupied by hydrogen can be substituted with another atom (unless otherwise specified) exemplified by, but not limited to carbon, oxygen, nitrogen, or sulfur, or a chemical group, exemplified by, but not limited to, hydroxy, oxo, nitro, methoxy, ethoxy, alkoxy, substituted alkoxy, trifluoromethoxy, haloalkoxy, fluoro, chloro, bromo, iodo, halo, methyl, ethyl, propyl, butyl, alkyl, alkenyl, alkynyl, substituted alkyl, trifluoromethyl, haloalkyl, hydroxyalkyl, alkoxyalkyl, thio, alkylthio, acyl, carboxy, alkoxycarbonyl, carboxamido, substituted carboxamido, alkylsulfonyl, alkylsulfinyl, alkylsulfonylamino, sulfonamido, substituted sulfonamido, cyano, amino, substituted amino, alkylamino, dialkylamino, aminoalkyl, acylamino, amidino, amidoximo, hydroxamoyl, phenyl, aryl, substituted aryl, aryloxy, arylalkyl, arylalkenyl, arylalkynyl, pyridyl, imidazolyl, heteroaryl, substituted heteroaryl, heteroaryloxy, heteroarylalkyl, heteroarylalkenyl, heteroarylalkynyl, cyclopropyl, cyclobutyl, cyclopentyl, cyclohexyl, cycloalkyl, cycloalkenyl, cycloalkylalkyl, substituted cycloalkyl, cycloalkyloxy, pyrrolidinyl, piperidinyl, morpholino, heterocycle, (heterocycle)oxy, and (heterocycle)alkyl; where preferred heteroatoms are oxygen, nitrogen, and sulfur. Additionally, where open valences exist on these substitute chemical groups they can be further substituted with alkyl, cycloalkyl, aryl, heteroaryl, and/or heterocycle groups, that where these open valences exist on carbon they can be further substituted by halogen and by oxygen-, nitrogen-, or sulfur-bonded substituents, and where multiple such open valences exist, these groups can be joined to form a ring, either by direct formation of a bond or by formation of bonds to a new heteroatom, preferably oxygen, nitrogen, or sulfur. It is further contemplated that the above substitutions can be made provided that replacing the hydrogen with the substituent does not introduce unacceptable instability to the molecules of the present invention, and is otherwise chemically reasonable. One of ordinary skill in the art would understand that with respect to any chemical group described as optionally substituted, only sterically practical and/or synthetically feasible chemical groups are meant to be included. “Optionally substituted” as used herein refers to all subsequent modifiers in a term or series of chemical groups. For example, in the term “optionally substituted arylalkyl,” the “alkyl” portion and the “aryl” portion of the molecule may or may not be substituted, and for the series “optionally substituted alkyl, cycloalkyl, aryl and heteroaryl,” the alkyl, cycloalkyl, aryl, and heteroaryl groups, independently of the others, may or may not be substituted.

[0117] “Reaction” as used herein refers to a process in which one or more substances or compounds or substrates is converted into one or more different substances, compounds, or processes.

### Conversion of Nitromethane and Trifluoroacetone to a β-Nitro Alcohol

[0118] Compound (4), (S)-3-amino-1,1,1-trifluoro-2-methylpropan-2-ol, is an intermediate in the synthesis of a novel compound for the treatment of cystic fibrosis.

[chemical structure]

[0119] Enzymatic synthesis of compound (4), a β-hydroxy-α-amino alcohol, presents an attractive alternative to traditional chemical synthesis. Use of enzyme biocatalysts may reduce chemical waste and allow a more efficient synthesis method.

[0120] Generation of chiral β-amino alcohols via a β-hydroxy-α-amino acid intermediate using a two-enzyme cascade has been reported by others (Duckers et al. Appl Microbiol Biotechnol, 2010, 88:409-424). In the first step, a threonine aldolase catalyzes the conversion of glycine (or another nucleophile) and acetaldehyde (or another electrophile) to threonine in a PLP-dependent mechanism. In the second step, an amino acid decarboxylase catalyzes the removal of the carboxyl group to generate the amino alcohol (which is also a PLP-dependent mechanism). We previously reported a two enzyme cascade for production of compound (4), utilizing engineered threonine aldolases and engineered amino acid decarboxylases (U.S. 63/285,377).

[0121] However, other biocatalytic routes have been proposed and may provide additional utility and efficiency under industrial synthesis conditions. These include use of an oxynitrilase (also known as hydroxynitrile lyase) to produce a cyanohydrin or β-nitro alcohol intermediate, followed by reduction to the β-hydroxy-α-amino alcohol of compound (4). The present disclosure details the use of oxynitrilases to perform the nitroaldol conversion of nitromethane and trifluoroacetone to a β-nitro alcohol intermediate. In this disclosure, the term nitroaldolase is used to describe the engineered oxynitrilases/hydroxynitrile lyases to highlight the improvements in enzyme functionality toward to the nitro aldol reaction.

[0122] Oxynitrilases are found mainly in plants, often stone fruit plants (e.g., almond, apricot), where the conversion of naturally occurring cyanogenic glycoside or cyano lipid cyanohydrins to cyanide is used as a defense mechanism against herbivores and microorganisms. Both (S) and (R)-selective oxynitrilases are known. As members of the α/β hydrolase fold family, oxynitrilases have a catalytic triad similar to esterases. Native substrates are thought to be acetone and benzaldehyde. Some oxynitrilases contain a non-catalytic FAD, which acts as a structural cofactor.

[0123] A proposed mechanism of oxynitrilases shows the activated serine in the catalytic triad acting as a general acid/base and not as a nucleophile (Gruber et al. J. Biol. Chem., 2004, 279:20501-20510). This is uncommon for members of the α/β hydrolase fold family, where serine usually acts as a nucleophile and forms an acyl-enzyme intermediate.

[0124] The present disclosure provides novel biocatalysts and associated methods of use for the synthesis of chiral β-amino alcohols via a β-nitro alcohol intermediate followed by chemical reduction. The nitroaldolase biocatalysts of the present disclosure are engineered variants of a polypeptide (SEQ ID NO: 2) encoded by a homolog gene from Baliospermum montanum (SEQ ID NO: 1). These engineered polypeptides are capable of catalyzing the conversion of trifluoroacetone (compound (1)) and nitromethane (compound (2)) to compound (4) via intermediate compound (3), as depicted below in Scheme 1.

[chemical structure]

[0125] In some embodiments, the present disclosure provides nitroaldolase enzymes having improved activity in the production of compound (3), as compared to a reference polypeptide. In some embodiments, the engineered nitroaldolase enzymes have the activity of Scheme 1.

[0126] As described herein, the engineered polypeptides exhibit stereoselectivity; thus, a nitroaldolase of Scheme 1 can be used to establish one, or more, chiral centers of a product. The nitroaldolases of the present disclosure produce (R) or (S) enantiomers.

[0127] In some embodiments, the present disclosure provides engineered nitroaldolase enzymes having improved stereoselectivity towards the (S)-β-nitro alcohol product (compound (3)) as compared to a reference polypeptide. In some embodiments, the present disclosure provides an engineered polypeptide comprising an amino acid sequence having at least 80% sequence identity to an amino acid reference sequence of SEQ ID NO: 2, 24, 496, 860, 1120, or 1348, and further comprising one or more amino acid residue differences as compared to the reference amino acid sequence, wherein the engineered nitroaldolase polypeptide has increased enantioselectivity towards compound (3).

[0128] In some embodiments, the present disclosure provides an engineered polypeptide comprising an amino acid sequence having at least 80% sequence identity to an amino acid reference sequence of SEQ ID NO: 2, 24, 496, 860, 1120, or 1348, and further comprising one or more amino acid residue differences as compared to the reference amino acid sequence, wherein the engineered nitroaldolase polypeptide has increased activity in the conversion of compound (1) and compound (2) to compound (3).

### Engineered Nitroaldolase Polypeptides

[0129] The present invention provides nitroaldolase polypeptides, polynucleotides encoding the polypeptides, methods of preparing the polypeptides, and methods for using the polypeptides. Where the description relates to polypeptides, it is to be understood that it can describe the polynucleotides encoding the polypeptides.

[0130] Suitable reaction conditions under which the above-described improved properties of the engineered polypeptides carry out the desired reaction can be determined with respect to concentrations or amounts of polypeptide, substrate, co-substrate, buffer, solvent, pH, conditions including temperature and reaction time, and/or conditions with the polypeptide immobilized on a solid support, as further described below and in the Examples.

[0131] In some embodiments, exemplary engineered nitroaldolases with improved properties, particularly in the stereoselective conversion of compound (1) and compound (2) to compound (3), comprise an amino acid sequence that has one or more residue differences as compared to SEQ ID NO: 2, 24, 496, 860, 1120, or 1348 at the residue positions indicated in Tables 2-1, 2-2, 3-1, 3-2, 4-1, 4-2, 5-1, 5-2, 6-1, 6-2, 7-1, and 7-2.

[0132] The structure and function information for exemplary non-naturally occurring (or engineered) polypeptides of the present invention are based on the conversion of compound (1) and compound (2) to compound (3), the results of which are shown below in Tables 2-1, 2-2, 3-1, 3-2, 4-1, 4-2, 5-1, 5-2, 6-1, 6-2, 7-1, and 7-2, as further described in the Examples. The odd numbered sequence identifiers (i.e., SEQ ID NOs) in these Tables refer to the nucleotide sequence encoding the amino acid sequence provided by the even numbered SEQ ID NOs in these Tables. Exemplary sequences are provided in the electronic sequence listing file accompanying this invention, which is hereby incorporated by reference herein. The amino acid residue differences are based on comparison to the reference sequence of SEQ ID NOs: 2, 24, 496, 860, 1120, and/or 1348, as indicated.

[0133] A nitroaldolase (SEQ ID NO: 2) homolog from Baliospermum montanum was selected based on conversion of compound (1) and compound (2) to compound (3). SEQ ID NO: 1 is a codon-optimized polynucleotide for expression in Escherichia coli that was synthesized based on the polypeptide sequence of SEQ ID NO: 2.

[0134] The activity and stereoselectivity of each engineered nitroaldolase polypeptide relative to the reference polypeptide of SEQ ID NOs: 2, 24, 496, 860, 1120, and/or 1348 was determined as conversion of the substrates described in the Examples herein. In some embodiments, a shake flask powder (SFP) is used as a secondary screen to assess the properties of the engineered nitroaldolases, the results of which are provided in the Examples. In some embodiments, the SFP forms provide a more purified powder preparation of the engineered polypeptides and can contain the engineered polypeptides that are up to about 30% of total protein.

[0135] In some embodiments, the specific enzyme properties are associated with the residues differences as compared to SEQ ID NOs: 2, 24, 496, 860, 1120, and/or 1348 at the residue positions indicated herein. In some embodiments, residue differences affecting polypeptide expression can be used to increase expression of the engineered nitroaldolase.

[0136] In light of the guidance provided herein, it is further contemplated that any of the exemplary engineered polypeptides comprising the even-numbered sequences of SEQ ID NOs: 4-1484 find use as the starting amino acid sequence for synthesizing other engineered nitroaldolase polypeptides, for example by subsequent rounds of evolution that incorporate new combinations of various amino acid differences from other polypeptides in Tables 2-1, 2-2, 3-1, 3-2, 4-1, 4-2, 5-1, 5-2, 6-1, 6-2, 7-1, and 7-2, and other residue positions described herein. Further improvements may be generated by including amino acid differences at residue positions that had been maintained as unchanged throughout earlier rounds of evolution.

[0137] In some embodiments, the engineered nitroaldolase polypeptide comprises an amino acid sequence having at least 80%, 85%, 86%, 87%, 88%, 89%, 90%, 91%, 92%, 93%, 94%, 95%, 96%, 97%, 98%, 99% or more sequence identity to reference sequence SEQ ID NO: 2 and one or more residue differences as compared to SEQ ID NO: 2, selected from: 7/9, 7/9/33/68/72/158, 7/9/33/72/175/197/230, 7/9/33/72/230, 7/9/68/72/197, 7/9/158/175, 7/9/175, 7/9/197, 7/33, 7/68/72/175, 7/72, 7/72/97/175/230, 9, 9/11/33/72/197/230, 9/33/68/158/197, 9/33/72/230, 9/33/97/230, 9/68/72, 9/97/175/202/218, 9/175, 9/202, 11, 13, 14/33/68/72/97, 18, 18/33/68/97/158/175/239, 18/33/72/97/158/175, 18/33/72/97/158/239, 18/33/72/97/175/202, 18/33/72/175/202/237/239, 18/33/72/197/237, 18/68/72, 18/68/72/158/175/237/239, 18/68/72/175/202/239, 18/68/72/239, 18/68/175/223/237/239, 18/68/239, 18/72/97/175/237/239, 18/72/175/197, 18/72/237, 18/72/239, 18/97/175/237/239, 18/97/223/237/239, 18/175, 18/197/239, 18/239, 20/124, 33/68/72, 33/68/72/175/230, 33/68/223/239, 33/72, 33/72/97/197, 33/72/175, 33/175, 39, 44/97, 52, 68/72, 68/72/97, 68/72/97/197, 68/72/197, 68/72/197/239, 68/97/175, 68/97/175/197/223, 72/97/158/223/237, 72/175/197, 97/158/175/197, 97/175, 103, 121, 122, 124, 125, 128, 133, 148, 175, 197, and 197/202. In some embodiments, the engineered nitroaldolase polypeptide comprises an amino acid sequence having at least 80%, 85%, 86%, 87%, 88%, 89%, 90%, 91%, 92%, 93%, 94%, 95%, 96%, 97%, 98%, 99% or more sequence identity to reference sequence SEQ ID NO: 2 and one or more residue differences as compared to SEQ ID NO: 2, selected from: 7V/9V, 7V/9V/33V/68L/72E/158Y, 7V/9V/33V/72E/175P/197V/230I, 7V/9V/33V/72E/230I, 7V/9V/68L/72E/197V, 7V/9V/158Y/175P, 7V/9V/175P, 7V/9V/197V, 7V/33V, 7V/68L/72E/175P, 7V/72E, 7V/72E/97I/175P/230I, 9V, 9V/11G/33V/72E/197V/230I, 9V/33V/68L/158Y/197V, 9V/33V/72E/230I, 9V/33V/97I/230I, 9V/68L/72E, 9V/97I/175P/202I/218M, 9V/175P, 9V/202I, 11S, 13G, 14Y/33V/68L/72E/97I, 18C/33V/68L/97I/158Y/175P/239F, 18C/33V/72E/97I/158Y/175P, 18C/33V/72E/97I/158Y/239F, 18C/33V/72E/97I/175P/202I, 18C/33V/72E/175P/202I/237P/239F, 18C/33V/72E/197V/237P, 18C/68L/72E, 18C/68L/72E/158Y/175P/237P/239F, 18C/68L/72E/175P/202I/239F, 18C/68L/72E/239F, 18C/68L/175P/223P/237P/239F, 18C/68L/239F, 18C/72E/97I/175P/237P/239F, 18C/72E/175P/197V, 18C/72E/237P, 18C/72E/239F, 18C/97I/175P/237P/239F, 18C/97I/223P/237P/239F, 18C/175P, 18C/197V/239F, 18C/239F, 18I, 20H/124C, 33V/68L/72E, 33V/68L/72E/175P/230I, 33V/68L/223P/239F, 33V/72E, 33V/72E/97I/197V, 33V/72E/175P, 33V/175P, 39A, 39G, 44N/97I, 52S, 68L/72E, 68L/72E/97I, 68L/72E/97I/197V, 68L/72E/197V, 68L/72E/197V/239F, 68L/97I/175P, 68L/97I/175P/197V/223P, 72E/97I/158Y/223P/237P, 72E/175P/197V, 97I/158Y/175P/197V, 97I/175P, 103M, 103S, 121Y, 122C, 122Q, 124C, 124E, 124T, 124Y, 125R, 128H, 128Y, 133A, 133C, 148M, 175P, 197V, and 197V/202I. In some embodiments, the engineered nitroaldolase polypeptide comprises an amino acid sequence having at least 80%, 85%, 86%, 87%, 88%, 89%, 90%, 91%, 92%, 93%, 94%, 95%, 96%, 97%, 98%, 99% or more sequence identity to reference sequence SEQ ID NO: 2 and one or more residue differences as compared to SEQ ID NO: 2, selected from: 17V/19V, I7V/I9V/A33V/I68L/K72E/F158Y, I7V/I9V/A33V/K72E/K175P/I197V/V230I, I7V/I9V/A33V/K72E/V230I, I7V/I9V/I68L/K72E/I197V, I7V/I9V/F158Y/K175P, I7V/I9V/K175P, I7V/I9V/I197V, I7V/A33V, I7V/I68L/K72E/K175P, I7V/K72E, I7V/K72E/V97I/K175P/V230I, I9V, I9V/T11G/A33V/K72E/I197V/V230I, I9V/A33V/I68L/F158Y/I197V, I9V/A33V/K72E/V230I, I9V/A33V/V97I/V230I, I9V/I68L/K72E, I9V/V97I/K175P/V202I/Q218M, I9V/K175P, I9V/V202I, T11S, C13G, H14Y/A33V/I68L/K72E/V97I, L18C/A33V/I68L/V97I/F158Y/K175P/I239F, L18C/A33V/K72E/V97I/F158Y/K175P, L18C/A33V/K72E/V97I/F158Y/I239F, L18C/A33V/K72E/V97I/K175P/V202I, L18C/A33V/K72E/K175P/V202I/I237P/I239F, L18C/A33V/K72E/I197V/I237P, L18C/I68L/K72E, L18C/I68L/K72E/F158Y/K175P/I237P/I239F, L18C/I68L/K72E/K175P/V202I/I239F, L18C/I68L/K72E/I239F, L18C/I68L/K175P/K223P/I237P/I239F, L18C/168L/I239F, L18C/K72E/V97I/K175P/I237P/I239F, L18C/K72E/K175P/I197V, L18C/K72E/I237P, L18C/K72E/I239F, L18C/V97I/K175P/I237P/I239F, L18C/V97I/K223P/I237P/I239F, L18C/K175P, L18C/I197V/I239F, L18C/I239F, L18I, Y20H/V124C, A33V/I68L/K72E, A33V/I68L/K72E/K175P/V230I, A33V/I68L/K223P/I239F, A33V/K72E, A33V/K72E/V97I/I197V, A33V/K72E/K175P, A33V/K175P, V39A, V39G, D44N/V97I, G52S, I68L/K72E, I68L/K72E/V97I, I68L/K72E/V97I/I197V, I68L/K72E/I197V, I68L/K72E/I197V/I239F, I68L/V97I/K175P, I68L/V97I/K175P/I197V/K223P, K72E/V97I/F158Y/K223P/I237P, K72E/K175P/I197V, V97I/F158Y/K175P/I197V, V97I/K175P, H103M, H103S, F121Y, S122C, S122Q, V124C, V124E, V124T, V124Y, F125R, W128H, W128Y, F133A, F133C, L148M, K175P, I197V, and I197V/V202I.

[0138] In some embodiments, the engineered nitroaldolase polypeptide comprises an amino acid sequence having at least 80%, 85%, 86%, 87%, 88%, 89%, 90%, 91%, 92%, 93%, 94%, 95%, 96%, 97%, 98%, 99% or more sequence identity to reference sequence SEQ ID NO: 2 and one or more residue differences as compared to SEQ ID NO: 2, selected from: 7/11/33/72/97, 7/11/33/97, 7/11/72, 7/11/158, 7/11/237, 7/33/72/97/158/175/197/237/239, 9/11/33, 9/11/33/72, 9/11/72, 9/33/68/97/237/239, 9/72/97/158/237/239, 9/218/239, 10, 11, 12, 13, 14, 18, 33/68/72/97/237/239, 33/72/158/239, 39, 40, 41, 48, 49, 51, 54, 54/126, 57, 68/175/239, 82, 84, 85, 86, 103, 104, 105, 107, 115, 117, 119, 119/120, 120, 122, 123, 124, 127, 130, 131, 133, 134, 137/145, 144, 145, 146, 147, 148, 149, 150, 152, 157, 158, 159, 169, 173, 174, 175, 180, 181, 183, 203, 204, 208, 209, 210, 215, 218, 236, and 237. In some embodiments, the engineered nitroaldolase comprises an amino acid sequence having at least 80%, 85%, 86%, 87%, 88%, 89%, 90%, 91%, 92%, 93%, 94%, 95%, 96%, 97%, 98%, 99% or more sequence identity to reference sequence SEQ ID NO: 2 and one or more residue differences as compared to SEQ ID NO: 2, selected from: 7V/11G/33V/72E/97I, 7V/11G/33V/97I, 7V/11G/72E, 7V/11G/158Y, 7V/11G/237P, 7V/33V/72E/97I/158Y/175P/197V/237P/239F, 9V/11G/33V, 9V/11G/33V/72E, 9V/11G/72E, 9V/33V/68L/97I/237P/239F, 9V/72E/97I/158Y/237P/239F, 9V/218M/239F, 10G, 10P, 10R, 11R, 11S, 12K, 13L, 14R, 18S, 18T, 33V/68L/72E/97I/237P/239F, 33V/72E/158Y/239F, 39R, 39W, 40L, 40S, 40T, 40V, 41C, 48W, 49Q, 49R, 51A, 51Q, 51S, 51T, 54N/126I, 54Y, 57N, 68L/175P/239F, 82T, 84L, 85A, 85L, 85M, 85Q, 86W, 103P, 104A, 104G, 104S, 105D, 107G, 107W, 115C, 115K, 115L, 115V, 117C, 117L, 119L, 119N/120F, 120C, 120L, 120Y, 122G, 122T, 123A, 123P, 123T, 124P, 127A, 127L, 127M, 130M, 130V, 131L, 133W, 134D, 134F, 134L, 134R, 134V, 134W, 137I/145V, 144L, 145F, 145L, 145P, 146D, 146G, 146N, 147R, 148P, 148V, 149W, 150I, 150L, 150V, 152P, 157V, 158I, 158L, 158M, 158R, 158W, 158Y, 159G, 159H, 159L, 169G, 169I, 169S, 173E, 173Y, 174C, 174G, 175D, 180G, 180V, 181C, 183K, 203Q, 204E, 204R, 204V, 208A, 208C, 208E, 208G, 208L, 208T, 208V, 209C, 210V, 215L, 218T, 236G, 236L, 237L, 237S, and 237W. In some embodiments, the engineered nitroaldolase comprises an amino acid sequence having at least 80%, 85%, 86%, 87%, 88%, 89%, 90%, 91%, 92%, 93%, 94%, 95%, 96%, 97%, 98%, 99% or more sequence identity to reference sequence SEQ ID NO: 2 and one or more residue differences as compared to SEQ ID NO: 2, selected from: 17V/T11G/A33V/K72E/V97I, I7V/T11G/A33V/V97I, I7V/T11G/K72E, 17V/T11G/F158Y, 17V/T11G/I237P, I7V/A33V/K72E/V97I/F158Y/K175P/I197V/I237P/I239F, I9V/T11G/A33V, I9V/T11G/A33V/K72E, I9V/T11G/K72E, I9V/A33V/I68L/V97I/I237P/I239F, I9V/K72E/V97I/F158Y/I237P/I239F, I9V/Q218M/I239F, H10G, H10P, H10R, T11R, T11S, I12K, C13L, H14R, L18S, L18T, A33V/I68L/K72E/V97I/I237P/I239F, A33V/K72E/F158Y/I239F, V39R, V39W, A40L, A40S, A40T, A40V, S41C, L48W, E49Q, E49R, I51A, I51Q, I51S, I51T, W54N/T126I, W54Y, Y57N, I68L/K175P/I239F, G82T, I84L, N85A, N85L, N85M, N85Q, I86W, H103P, N104A, N104G, N104S, A105D, M107G, M107W, A115C, A115K, A115L, A115V, V117C, V117L, K119L, K119N/K120F, K120C, K120L, K120Y, S122G, S122T, E123A, E123P, E123T, V124P, D127A, D127L, D127M, D130M, D130V, S131L, F133W, S134D, S134F, S134L, S134R, S134V, S134W, T137I/A145V, T144L, A145F, A145L, A145P, V146D, V146G, V146N, E147R, L148P, L148V, G149W, D150I, D150L, D150V, T152P, I157V, F158I, F158L, F158M, F158R, F158W, F158Y, S159G, S159H, S159L, A169G, A169I, A169S, V173E, V173Y, R174C, R174G, K175D, E180G, E180V, Q181C, L183K, Y203Q, G204E, G204R, G204V, Q208A, Q208C, Q208E, Q208G, Q208L, Q208T, Q208V, I209C, F210V, Q215L, Q218T, K236G, K236L, I237L, I237S, and I237W.

[0139] In some embodiments, the engineered nitroaldolase comprises an amino acid sequence having at least 80%, 85%, 86%, 87%, 88%, 89%, 90%, 91%, 92%, 93%, 94%, 95%, 96%, 97%, 98%, 99% or more sequence identity to reference sequence SEQ ID NO: 24 and one or more residue differences as compared to SEQ ID NO: 24, selected from: 9/39/122/157, 18, 18/33/39/230, 18/33/175, 18/39/44/118, 18/175, 20, 33/39, 33/39/44/118/121, 33/39/44/121, 33/39/44/152, 33/39/44/175, 33/39/44/197, 33/39/44/210/230, 33/39/118/121/175, 33/39/121/175, 33/39/197/210, 33/39/210, 33/39/210/230, 33/118/121, 33/118/121/175, 39, 39/44/103, 39/44/118, 39/44/152/230, 39/44/175/197/230, 39/103, 39/103/125, 39/103/125/127/146, 39/103/125/127/146/150, 39/103/125/146, 39/103/127/150, 39/103/150, 39/118/121, 39/197, 39/197/210, 43, 44/103, 81, 103, 103/125/127, 103/125/146, 103/127, 103/150, 118/121, 118/121/175, 118/121/197, 121, 152, 152/197, 154, 159, 163, 175, 210, 232, and 238. In some embodiments, the engineered nitroaldolase comprises an amino acid sequence having at least 80%, 85%, 86%, 87%, 88%, 89%, 90%, 91%, 92%, 93%, 94%, 95%, 96%, 97%, 98%, 99% or more sequence identity to reference sequence SEQ ID NO: 24 and one or more residue differences as compared to SEQ ID NO: 24, selected from: 9V/39W/122T/157V, 18I, 18I/33V/39W/230I, 18I/33V/175P, 18I/39W/44N/118L, 18I/175P, 20H, 33V/39W, 33V/39W/44N/118L/121Y, 33V/39W/44N/121Y, 33V/39W/44N/152F, 33V/39W/44N/175P, 33V/39W/44N/197V, 33V/39W/44N/210M/230I, 33V/39W/118L/121Y/175P, 33V/39W/121Y/175P, 33V/39W/197V/210M, 33V/39W/210M, 33V/39W/210M/230I, 33V/118L/121W/175P, 33V/118L/121Y, 39W, 39W/44N/118L, 39W/44N/152F/230I, 39W/44N/175P/197V/230I, 39W/44Y/103S, 39W/103M, 39W/103M/125R/146L, 39W/103M/150P, 39W/103Q, 39W/103S, 39W/103S/125P/127G/146L/150P, 39W/103S/125R, 39W/103S/125R/127G/146L, 39W/103S/127G/150P, 39W/118L/121Y, 39W/197V, 39W/197V/210M, 43M, 43Q, 43R, 43S, 43T, 44N/103S, 81F, 103L, 103M, 103M/125P/146L, 103M/127G, 103Q, 103S, 103S/125P/127G, 103S/150P, 103V, 118L/121Y, 118L/121Y/175P, 118L/121Y/197V, 121Y, 152A/197V, 152F, 154I, 159Q, 163P, 175P, 210M, 232G, and 238M. In some embodiments, the engineered nitroaldolase polypeptide comprises an amino acid sequence having at least 80%, 85%, 86%, 87%, 88%, 89%, 90%, 91%, 92%, 93%, 94%, 95%, 96%, 97%, 98%, 99% or more sequence identity to reference sequence SEQ ID NO: 24 and one or more residue differences as compared to SEQ ID NO: 24, selected from: I9V/V39W/S122T/I157V, L18I, L18I/A33V/V39W/V230I, L18I/A33V/K175P, L18I/V39W/D44N/Y118L, L18I/K175P, Y20H, A33V/V39W, A33V/V39W/D44N/Y118L/F121Y, A33V/V39W/D44N/F121Y, A33V/V39W/D44N/T152F, A33V/V39W/D44N/K175P, A33V/V39W/D44N/I197V, A33V/V39W/D44N/F210M/V230I, A33V/V39W/Y118L/F121Y/K175P, A33V/V39W/F121Y/K175P, A33V/V39W/I197V/F210M, A33V/V39W/F210M, A33V/V39W/F210M/V230I, A33V/Y118L/F121W/K175P, A33V/Y118L/F121Y, V39W, V39W/D44N/Y118L, V39W/D44N/T152F/V230I, V39W/D44N/K175P/I197V/V230I, V39W/D44Y/H103S, V39W/H103M, V39W/H103M/F125R/V146L, V39W/H103M/D150P, V39W/H103Q, V39W/H103S, V39W/H103S/F125P/D127G/V146L/D150P, V39W/H103S/F125R, V39W/H103S/F125R/D127G/V146L, V39W/H103S/D127G/D150P, V39W/Y118L/F121Y, V39W/I197V, V39W/I197V/F210M, I43M, I43Q, I43R, I43S, I43T, D44N/H103S, G81F, H103L, H103M, H103M/F125P/V146L, H103M/D127G, H103Q, H103S, H103S/F125P/D127G, H103S/D150P, H103V, Y118L/F121Y, Y118L/F121Y/K175P, Y118L/F121Y/I197V, F121Y, T152A/I197V, T152F, A154I, S159Q, I163P, K175P, F210M, S232G, and Q238M.

[0140] In some embodiments, the engineered nitroaldolase comprises an amino acid sequence having at least 80%, 85%, 86%, 87%, 88%, 89%, 90%, 91%, 92%, 93%, 94%, 95%, 96%, 97%, 98%, 99% or more sequence identity to reference sequence SEQ ID NO: 24 and one or more residue differences as compared to SEQ ID NO: 24, selected from: 7, 9/13, 9/13/39, 9/13/39/68/72/239, 9/13/39/68/239, 9/13/39/72/122, 9/13/39/97/239, 9/13/68/72/97/239, 9/13/68/97/134/239, 9/13/68/97/239, 9/13/72, 9/13/134, 11, 12/42/125/127, 12/103, 12/103/150, 13, 13/39, 13/39/68, 13/39/68/72/97, 13/39/72/97/122/134/223, 13/39/97/239, 13/39/239, 13/68, 13/68/72/97/122/239, 16, 18/33/39/44/118/121/175/197/210, 18/33/39/44/121, 18/33/39/112/118/121/197, 18/33/39/121, 18/33/39/121/175, 18/33/39/121/175/197, 18/33/39/121/175/210, 18/33/39/121/210, 18/33/118/121, 18/33/121, 18/33/121/197, 18/33/121/210/230, 18/39/44/118/121/230, 18/39/44/121/175/210, 18/39/118/121, 18/39/118/121/210, 18/39/121/175, 18/39/121/175/210, 18/39/121/197/210, 18/118/121, 18/118/121/175, 18/118/121/210, 18/118/121/230, 18/121, 18/121/175, 18/121/210, 18/121/230, 20, 21, 33/39/44/118/121, 33/39/44/118/121/210/230, 33/39/44/121, 33/39/44/121/152, 33/39/44/121/175/210, 33/39/44/121/230, 33/39/73/121/197, 33/39/118/121/175, 33/39/118/121/175/230, 33/39/121, 33/39/121/175, 33/39/121/210/230, 33/118/121, 33/118/121/175, 33/118/121/197, 33/121, 33/121/230, 37/91, 39/44/118/121/175/210, 39/68/72/239, 39/118/121, 39/118/121/210, 39/121, 39/121/210/230, 43, 44, 76, 79, 101, 118/121, 118/121/175, 118/121/197, 121, 121/175/230, 121/210, 148, 153, 159, 161, 172, 200, 207, 233, 245, and 248. In some embodiments, the engineered nitroaldolase comprises an amino acid sequence having at least 80%, 85%, 86%, 87%, 88%, 89%, 90%, 91%, 92%, 93%, 94%, 95%, 96%, 97%, 98%, 99% or more sequence identity to reference sequence SEQ ID NO: 24 and one or more residue differences as compared to SEQ ID NO: 24, selected from: 7E, 9V/13G, 9V/13G/39W, 9V/13G/39W/68L/72E/239F, 9V/13G/39W/68L/239F, 9V/13G/39W/72E/122T, 9V/13G/39W/97I/239F, 9V/13G/68L/72E/97I/239F, 9V/13G/68L/97I/134D/239F, 9V/13G/68L/97I/239F, 9V/13G/72E, 9V/13G/134D, 1 IN, 12A/42W/125R/127G, 12A/103S, 12A/103S/150P, 13F, 13G/39W, 13G/39W/68L, 13G/39W/68L/72E/97I, 13G/39W/72E/97I/122T/134D/223P, 13G/39W/97I/239F, 13G/39W/239F, 13G/68L, 13G/68L/72E/97I/122T/239F, 16M, 16V, 18C/33V/39W/112R/118L/121W/197V, 18C/33V/39W/121W/175P/210M, 18C/33V/39W/121W/210M, 18C/33V/39W/121Y/175P, 18C/33V/118L/121W, 18C/33V/118L/121Y, 18C/33V/121Y, 18C/33V/121Y/197V, 18C/33V/121Y/210M/230I, 18C/39W/44N/121Y/175P/210M, 18C/39W/118L/121W, 18C/39W/121W/175P/210M, 18C/39W/121W/197V/210M, 18C/118L/121W, 18C/118L/121Y, 18C/121V, 18C/121V/175P, 18C/121W, 18C/121W/175P, 18C/121W/210M, 18C/121Y, 18C/121Y/230I, 18I/33V/39W/44N/118L/121W/175P/197V/210M, 18I/33V/39W/44N/121T, 18I/33V/39W/121T/175P, 18I/33V/39W/121V/175P/197V, 18I/33V/39W/121W, 18I/33V/118L/121W, 18I/39W/44N/118L/121W/230I, 18I/39W/44N/121V/175P/210M, 18I/39W/118L/121W/210M, 18I/39W/121V/175P, 18I/118L/121T, 18I/118L/121W, 18I/118L/121W/175P, 18I/118L/121W/210M, 18I/118L/121Y, 18I/118L/121Y/230I, 18I/121T/175P, 18I/121W, 18I/121Y/210M, 20G, 20K, 20R, 20T, 21V, 33V/39G/44N/121W/152A, 33V/39W/44N/118L/121W/210M/230I, 33V/39W/44N/118L/121Y, 33V/39W/44N/121V, 33V/39W/44N/121Y, 33V/39W/44N/121Y/175P/210M, 33V/39W/44N/121Y/230I, 33V/39W/73N/121Y/197V, 33V/39W/118L/121W/175P, 33V/39W/118L/121Y/175P, 33V/39W/118L/121Y/175P/230I, 33V/39W/121V, 33V/39W/121W, 33V/39W/121W/210M/230I, 33V/39W/121Y/175P, 33V/118L/121W/175P, 33V/118L/121W/197V, 33V/118L/121Y, 33V/121W, 33V/121Y/230I, 37L/91G, 39G/68L/72E/239F, 39W/44N/118L/121W/175P/210M, 39W/118L/121W/210M, 39W/118L/121Y, 39W/118L/121Y/210M, 39W/121W, 39W/121W/210M/230I, 43E, 43Q, 43S, 43W, 44V, 76P, 79F, 101L, 118L/121W, 118L/121Y, 118L/121Y/175P, 118L/121Y/197V, 121V, 121W, 121Y, 121Y/175P/230I, 121Y/210M, 148F, 153W, 159Q, 161M, 172A, 172E, 172G, 172Q, 172R, 172V, 200G, 207N, 233R, 245D, 245G, 248G, and 248S. In some embodiments, the engineered nitroaldolase polypeptide comprises an amino acid sequence having at least 80%, 85%, 86%, 87%, 88%, 89%, 90%, 91%, 92%, 93% 94% 95% 96%, 97% 98%, 99% or more sequence identity to reference sequence SEQ ID NO: 24 and one or more residue differences as compared to SEQ ID NO: 24, selected from: 17E, I9V/C13G, I9V/C13G/V39W, I9V/C13G/V39W/I68L/K72E/I239F, I9V/C13G/V39W/I68L/I239F, I9V/C13G/V39W/K72E/S122T, I9V/C13G/V39W/V97I/I239F, I9V/C13G/I68L/K72E/V97I/I239F, I9V/C13G/168L/V97I/S134D/I239F, I9V/C13G/168L/V97I/I239F, I9V/C13G/K72E, I9V/C13G/S134D, S11N, I12A/G42W/F125R/D127G, I12A/H103S, 112A/H103S/D150P, C13F, C13G/V39W, C13G/V39W/168L, C13G/V39W/I68L/K72E/V97I, C13G/V39W/K72E/V97I/S122T/S134D/K223P, C13G/V39W/V97I/I239F, C13G/V39W/I239F, C13G/I68L, C13G/I68L/K72E/V97I/S122T/I239F, A16M, A16V, L18C/A33V/V39W/H112R/Y118L/F121W/1197V, L18C/A33V/V39W/F121W/K175P/F210M, L18C/A33V/V39W/F121W/F210M, L18C/A33V/V39W/F121Y/K175P, L18C/A33V/Y118L/F121W, L18C/A33V/Y118L/F121Y, L18C/A33V/F121Y, L18C/A33V/F121Y/1197V, L18C/A33V/F121Y/F210M/V230I, L18C/V39W/D44N/F121Y/K175P/F210M, L18C/V39W/Y118L/F121W, L18C/V39W/F121W/K175P/F210M, L18C/V39W/F121W/1197V/F210M, L18C/Y118L/F121W, L18C/Y118L/F121Y, L18C/F121V, L18C/F121V/K175P, L18C/F121W, L18C/F121W/K175P, L18C/F121W/F210M, L18C/F121Y, L18C/F121Y/V230I, L18I/A33V/V39W/D44N/Y118L/F121W/K175P/I197V/F210M, L18I/A33V/V39W/D44N/F121T, L18I/A33V/V39W/F121T/K175P, L18I/A33V/V39W/F121V/K175P/I197V, L18I/A33V/V39W/F121W, L18I/A33V/Y118L/F121W, L18I/V39W/D44N/Y118L/F121W/V230I, L18I/V39W/D44N/F121V/K175P/F210M, L18I/V39W/Y118L/F121W/F210M, L18I/V39W/F121V/K175P, L18I/Y118L/F121T, L18I/Y118L/F121W, L18I/Y118L/F121W/K175P, L18I/Y118L/F121W/F210M, L18I/Y118L/F121Y, L18I/Y118L/F121Y/V230I, L18I/F121T/K175P, L18I/F121W, L18I/F121Y/F210M, Y20G, Y20K, Y20R, Y20T, K21V, A33V/V39G/D44N/F121W/T152A, A33V/V39W/D44N/Y118L/F121W/F210M/V230I, A33V/V39W/D44N/Y118L/F121Y, A33V/V39W/D44N/F121V, A33V/V39W/D44N/F121Y, A33V/V39W/D44N/F121Y/K175P/F210M, A33V/V39W/D44N/F121Y/V230I, A33V/V39W/K73N/F121Y/I197V, A33V/V39W/Y118L/F121W/K175P, A33V/V39W/Y118L/F121Y/K175P, A33V/V39W/Y118L/F121Y/K175P/V230I, A33V/V39W/F121V, A33V/V39W/F121W, A33V/V39W/F121W/F210M/V230I, A33V/V39W/F121Y/K175P, A33V/Y118L/F121W/K175P, A33V/Y118L/F121W/I197V, A33V/Y118L/F121Y, A33V/F121W, A33V/F121Y/V230I, D37L/E91G, V39G/I68L/K72E/I239F, V39W/D44N/Y118L/F121W/K175P/F210M, V39W/Y118L/F121W/F210M, V39W/Y118L/F121Y, V39W/Y118L/F121Y/F210M, V39W/F121W, V39W/F121W/F210M/V230I, I43E, I43Q, I43S, I43W, D44V, L76P, E79F, V101L, Y118L/F121W, Y118L/F121Y, Y118L/F121Y/K175P, Y118L/F121Y/I197V, F121V, F121W, F121Y, F121Y/K175P/V230I, F121Y/F210M, L148F, L153W, S159Q, S161M, L172A, L172E, L172G, L172Q, L172R, L172V, V200G, D207N, A233R, L245D, L245G, 1248G, and 1248S.

[0141] In some embodiments, the engineered nitroaldolase comprises an amino acid sequence having at least 80%, 85%, 86%, 87%, 88%, 89%, 90%, 91%, 92%, 93%, 94%, 95%, 96%, 97%, 98%, 99% or more sequence identity to reference sequence SEQ ID NO: 496 and one or more residue differences as compared to SEQ ID NO: 496, selected from: 43/103, 43/103/172/238, 43/103/238/241, 43/238, 81/232, 103, 103/159/238, 103/194/238, 103/238, 122, 232, 238, and 238/241. In some embodiments, the engineered nitroaldolase comprises an amino acid sequence having at least 80%, 85%, 86%, 87%, 88%, 89%, 90%, 91%, 92%, 93%, 94%, 95%, 96%, 97%, 98%, 99% or more sequence identity to reference sequence SEQ ID NO: 496 and one or more residue differences as compared to SEQ ID NO: 496, selected from: 43E/103S/238M/241R, 43M/103L, 43Q/103S/238M/241R, 43Q/238M, 43S/103S/172R/238M, 43S/238M, 81F/232G, 103L, 103S, 103S/159Q/238M, 103S/194L/238M, 103S/238M, 103V, 122C, 122I, 122K, 122L, 122M, 122Q, 122R, 122T, 122V, 232G, 238M, and 238M/241R. In some embodiments, the engineered nitroaldolase polypeptide comprises an amino acid sequence having at least 80%, 85%, 86%, 87%, 88%, 89%, 90%, 91%, 92%, 93%, 94%, 95%, 96%, 97%, 98%, 99% or more sequence identity to reference sequence SEQ ID NO: 496 and one or more residue differences as compared to SEQ ID NO: 496, selected from: I43E/H103S/Q238M/K241R, I43M/H103L, I43Q/H103S/Q238M/K241R, I43Q/Q238M, I43S/H103S/L172R/Q238M, I43S/Q238M, G81F/S232G, H103L, H103S, H103S/S159Q/Q238M, H103S/Y194L/Q238M, H103S/Q238M, H103V, S122C, S122I, S122K, S122L, S122M, S122Q, S122R, S122T, S122V, S232G, Q238M, and Q238M/K241R.

[0142] In some embodiments, the engineered nitroaldolase comprises an amino acid sequence having at least 80%, 85%, 86%, 87%, 88%, 89%, 90%, 91%, 92%, 93%, 94%, 95%, 96%, 97%, 98%, 99% or more sequence identity to reference sequence SEQ ID NO: 496 and one or more residue differences as compared to SEQ ID NO: 496, selected from: 12, 43, 43/47/103, 43/47/103/232, 43/103, 43/103/121/172/241, 43/103/172, 43/103/172/238, 43/103/238, 43/103/238/241, 43/121, 43/194/238, 43/238, 44/103/121/238, 44/103/238, 44/103/238/241, 44/121/238/241, 47/103, 63, 103, 103/121, 103/121/172/238, 103/159/238, 103/172/238, 103/194/238, 103/238, 122, 131, 146, 178, 180, and 221. In some embodiments, the engineered nitroaldolase comprises an amino acid sequence having at least 80%, 85%, 86%, 87%, 88%, 89%, 90%, 91%, 92%, 93%, 94%, 95%, 96%, 97%, 98%, 99% or more sequence identity to reference sequence SEQ ID NO: 496 and one or more residue differences as compared to SEQ ID NO: 496, selected from: 12V, 43E/103S/121W/172R/241R, 43E/103S/238M, 43E/103S/238M/241R, 43M/47G/103L, 43M/47G/103V, 43M/103L, 43M/103S, 43M/103V, 43Q/47G/103S/232G, 43Q/103L/172R, 43Q/103S, 43Q/103S/238M/241R, 43Q/121W, 43Q/238M, 43S, 43S/103L, 43S/103S, 43S/103S/172R, 43S/103S/172R/238M, 43S/103S/238M/241R, 43S/194L/238M, 43S/238M, 44V/103S/121W/238M, 44V/103S/238M, 44V/103S/238M/241R, 44V/121W/238M/241R, 47G/103L, 63P, 103L, 103S, 103S/121W, 103S/121W/172R/238M, 103S/159Q/238M, 103S/172R/238M, 103S/194L/238M, 103S/238M, 103V, 122H, 122I, 122K, 122L, 122M, 122N, 122R, 122T, 122V, 131Y, 146I, 178A, 180L, 180V, and 221G. In some embodiments, the engineered nitroaldolase polypeptide comprises an amino acid sequence having at least 80%, 85%, 86%, 87%, 88%, 89%, 90%, 91%, 92%, 93%, 94%, 95%, 96%, 97%, 98%, 99% or more sequence identity to reference sequence SEQ ID NO: 496 and one or more residue differences as compared to SEQ ID NO: 496, selected from: I12V, I43E/H103S/Y121W/L172R/K241R, I43E/H103S/Q238M, I43E/H103S/Q238M/K241R, I43M/Q47G/H103L, I43M/Q47G/H103V, I43M/H103L, I43M/H103S, I43M/H103V, I43Q/Q47G/H103S/S232G, I43Q/H103L/L172R, I43Q/H103S, I43Q/H103S/Q238M/K241R, I43Q/Y121W, I43Q/Q238M, I43S, I43S/H103L, I43S/H103S, I43S/H103S/L172R, I43S/H103S/L172R/Q238M, I43S/H103S/Q238M/K241R, I43S/Y194L/Q238M, I43S/Q238M, N44V/H103S/Y121W/Q238M, N44V/H103S/Q238M, N44V/H103S/Q238M/K241R, N44V/Y121W/Q238M/K241R, Q47G/H103L, T63P, H103L, H103S, H103S/Y121W, H103S/Y121W/L172R/Q238M, H103S/S159Q/Q238M, H103S/L172R/Q238M, H103S/Y194L/Q238M, H103S/Q238M, H103V, S122H, S122I, S122K, S122L, S122M, S122N, S122R, S122T, S122V, S131Y, V146I, F178A, E180L, E180V, and N221G.

[0143] In some embodiments, the engineered nitroaldolase comprises an amino acid sequence having at least 80%, 85%, 86%, 87%, 88%, 89%, 90%, 91%, 92%, 93%, 94%, 95%, 96%, 97%, 98%, 99% or more sequence identity to reference sequence SEQ ID NO: 860 and one or more residue differences as compared to SEQ ID NO: 860, selected from: 12, 12/43/63/103/146/180/232/241, 12/43/63/103/146/241, 12/43/81/103/241, 12/43/81/146/232/241, 12/43/81/180/241, 12/43/81/232/241, 12/43/81/241, 12/43/103, 12/43/103/146/180/232/241, 12/43/103/146/180/241, 12/43/103/180/241, 12/43/103/241, 12/43/146/180/232/241, 12/43/180/241, 12/63/81/103/241, 12/81, 12/81/180/241, 12/103/146/241, 12/103/180/241, 12/146, 12/146/180/241, 12/180/232/241, 12/241, 18, 43/81/232/241, 43/103/146/180, 43/103/180/241, 43/103/241, 43/180/232, 43/232/241, 63/103/180/232, 78, 81, 81/103/146, 81/146/180/241, 81/146/241, 81/180/241, 84, 103, 103/146, 103/146/180, 103/146/180/241, 103/180, 103/180/241, 103/261, 144, 145, 146/180/232, 146/180/241, 146/241, 150, 166, 172, 180/232, 232/241, and 241. In some embodiments, the engineered nitroaldolase comprises an amino acid sequence having at least 80%, 85%, 86%, 87%, 88%, 89%, 90%, 91%, 92%, 93%, 94%, 95%, 96%, 97%, 98%, 99% or more sequence identity to reference sequence SEQ ID NO: 860 and one or more residue differences as compared to SEQ ID NO: 860, selected from: 12V, 12V/43M/63P/103L/146I/180L/232G/241R, 12V/43M/81F/103L/241R, 12V/43M/81F/146I/232G/241R, 12V/43M/81F/180V/241R, 12V/43M/81F/232G/241R, 12V/43M/81F/241R, 12V/43M/103L/180L/241R, 12V/43M/103L/241R, 12V/43M/103V/146I/180V/241R, 12V/43M/103V/241R, 12V/43M/146I/180L/232G/241R, 12V/43M/180L/241R, 12V/43M/180V/241R, 12V/43Q/63P/103L/146I/241R, 12V/43Q/103L/146I/180V/232G/241R, 12V/43Q/103L/146I/180V/241R, 12V/43Q/103L/180V/241R, 12V/43Q/103V, 12V/63P/81F/103L/241R, 12V/81F, 12V/81F/180V/241R, 12V/103L/146I/241R, 12V/103L/180L/241R, 12V/103V/180V/241R, 12V/146I, 12V/146I/180L/241R, 12V/180L/232G/241R, 12V/180V/232G/241R, 12V/241R, 18V, 43M/81F/232G/241R, 43M/103L/146I/180V, 43M/103L/180V/241R, 43M/103L/241R, 43M/103V/146I/180V, 43M/180L/232G, 43M/232G/241R, 43Q/103V/146I/180L, 63P/103L/180L/232G, 78A, 81F/103L/146I, 81F/146I/180L/241R, 81F/146I/241R, 81F/180L/241R, 81Q, 84Y, 103A, 103L, 103L/146I, 103L/146I/180V, 103L/180L, 103L/180V/241R, 103N, 103T, 103T/261V, 103V/146I/180L/241R, 144V, 145V, 146I/180L/241R, 146I/180V/232G, 146I/241R, 150H, 166L, 172L, 172V, 180L/232G, 232G/241R, and 241R. In some embodiments, the engineered nitroaldolase polypeptide comprises an amino acid sequence having at least 80%, 85%, 86%, 87%, 88%, 89%, 90%, 91%, 92%, 93% 94%, 95% 96%, 97% 98%, 99% or more sequence identity to reference sequence SEQ ID NO: 860 and one or more residue differences as compared to SEQ ID NO: 860, selected from: I12V, I12V/S43M/T63P/S103L/V146I/E180L/S232G/K241R, I12V/S43M/G81F/S103L/K241R, I12V/S43M/G81F/V146I/S232G/K241R, I12V/S43M/G81F/E180V/K241R, I12V/S43M/G81F/S232G/K241R, I12V/S43M/G81F/K241R, I12V/S43M/S103L/E180L/K241R, I12V/S43M/S103L/K241R, I12V/S43M/S103V/V146I/E180V/K241R, I12V/S43M/S103V/K241R, I12V/S43M/V146I/E180L/S232G/K241R, I12V/S43M/E180L/K241R, I12V/S43M/E180V/K241R, I12V/S43Q/T63P/S103L/V146I/K241R, I12V/S43Q/S103L/V146I/E180V/S232G/K241R, I12V/S43Q/S103L/V146I/E180V/K241R, I12V/S43Q/S103L/E180V/K241R, I12V/S43Q/S103V, I12V/T63P/G81F/S103L/K241R, I12V/G81F, I12V/G81F/E180V/K241R, I12V/S103L/V146I/K241R, I12V/S103L/E180L/K241R, I12V/S103V/E180V/K241R, 112V/V146I, I12V/V146I/E180L/K241R, I12V/E180L/S232G/K241R, I12V/E180V/S232G/K241R, I12V/K241R, L18V, S43M/G81F/S232G/K241R, S43M/S103L/V146I/E180V, S43M/S103L/E180V/K241R, S43M/S103L/K241R, S43M/S103V/V146I/E180V, S43M/E180L/S232G, S43M/S232G/K241R, S43Q/S103V/V146I/E180L, T63P/S103L/E180L/S232G, G78A, G81F/S103L/V146I, G81F/V146I/E180L/K241R, G81F/V146I/K241R, G81F/E180L/K241R, G81Q, I84Y, S103A, S103L, S103L/V146I, S103L/V146I/E180V, S103L/E180L, S103L/E180V/K241R, S103N, S103T, S103T/A261V, S103V/V146I/E180L/K241R, T144V, A145V, V146I/E180L/K241R, V146I/E180V/S232G, V146I/K241R, D150H, V166L, R172L, R172V, E180L/S232G, S232G/K241R, and K241R.

[0144] In some embodiments, the engineered nitroaldolase comprises an amino acid sequence having at least 80%, 85%, 86%, 87%, 88%, 89%, 90%, 91%, 92%, 93%, 94%, 95%, 96%, 97%, 98%, 99% or more sequence identity to reference sequence SEQ ID NO: 860 and one or more residue differences as compared to SEQ ID NO: 860, selected from: 9, 12, 12/43/63/103/146/180/232/241, 12/43/63/103/146/241, 12/43/103/146/180/232/241, 12/43/103/146/180/241, 12/43/103/146/232/241, 12/43/103/146/241, 12/43/103/180/241, 12/43/146/180/232/241, 12/43/146/241, 12/43/180/232, 12/43/180/241, 12/63/103/146/232/241, 12/103/146/241, 12/103/180/241, 12/146, 12/146/180/241, 12/146/232/241, 12/146/241, 12/180, 12/180/232/241, 12/180/241, 12/241, 18, 43/63/103/180/232/241, 43/103/146/180, 43/103/180, 43/103/180/232/241, 43/103/180/241, 43/180/232, 63/103/180/232, 103, 103/146/180, 103/146/180/241, 103/180, 103/180/241, 103/241, 118, 119, 122, 144, 145, 146/180/241, 154, 160, 172, 180/232, 180/232/241, 180/241, 208, 211, and 212. In some embodiments, the engineered nitroaldolase comprises an amino acid sequence having at least 80%, 85%, 86%, 87%, 88%, 89%, 90%, 91%, 92%, 93%, 94%, 95%, 96%, 97%, 98%, 99% or more sequence identity to reference sequence SEQ ID NO: 860 and one or more residue differences as compared to SEQ ID NO: 860, selected from: 9V, 12V, 12V/43M/63P/103L/146I/180L/232G/241R, 12V/43M/103L/146I/241R, 12V/43M/103L/180L/241R, 12V/43M/103V/146I/180V/241R, 12V/43M/103V/146I/232G/241R, 12V/43M/146I/180L/232G/241R, 12V/43M/180L/232G, 12V/43M/180L/241R, 12V/43Q/63P/103V/146I/241R, 12V/43Q/103L/146I/180V/232G/241R, 12V/43Q/103L/146I/180V/241R, 12V/43Q/103L/146I/241R, 12V/43Q/103L/180V/241R, 12V/43Q/146I/241R, 12V/63P/103L/146I/232G/241R, 12V/103L/180L/241R, 12V/103L/180V/241R, 12V/103V/146I/241R, 12V/103V/180L/241R, 12V/103V/180V/241R, 12V/146I, 12V/146I/180L/241R, 12V/146I/232G/241R, 12V/146I/241R, 12V/180L, 12V/180L/232G/241R, 12V/180L/241R, 12V/180V, 12V/180V/232G/241R, 12V/180V/241R, 12V/241R, 18V, 43M/63P/103L/180V/232G/241R, 43M/103L/146I/180V, 43M/103L/180V, 43M/103L/180V/241R, 43M/103V/146I/180V, 43M/180L/232G, 43Q/103L/180V/232G/241R, 43Q/103V/146I/180L, 43Q/103V/180L/241R, 43Q/103V/180V/232G/241R, 63P/103L/180L/232G, 103A, 103L, 103L/146I/180V, 103L/146I/180V/241R, 103L/180L, 103L/180V/241R, 103L/241R, 103N, 103T, 103V/146I/180L/241R, 103V/180V/241R, 118L, 118V, 119H, 122H, 144H, 144V, 145V, 146I/180L/241R, 154R, 160L, 172C, 172L, 172V, 180L/232G, 180L/241R, 180V/232G, 180V/232G/241R, 208F, 211F, and 212P. In some embodiments, the engineered nitroaldolase polypeptide comprises an amino acid sequence having at least 80%, 85%, 86%, 87%, 88%, 89%, 90%, 91%, 92%, 93%, 94%, 95%, 96%, 97%, 98%, 99% or more sequence identity to reference sequence SEQ ID NO: 860 and one or more residue differences as compared to SEQ ID NO: 860, selected from: I9V, I12V, I12V/S43M/T63P/S103L/V146I/E180L/S232G/K241R, I12V/S43M/S103L/V146I/K241R, I12V/S43M/S103L/E180L/K241R, I12V/S43M/S103V/V146I/E180V/K241R, I12V/S43M/S103V/V146I/S232G/K241R, I12V/S43M/V146I/E180L/S232G/K241R, I12V/S43M/E180L/S232G, I12V/S43M/E180L/K241R, I12V/S43Q/T63P/S103V/V146I/K241R, I12V/S43Q/S103L/V146I/E180V/S232G/K241R, I12V/S43Q/S103L/V146I/E180V/K241R, I12V/S43Q/S103L/V146I/K241R, I12V/S43Q/S103L/E180V/K241R, I12V/S43Q/V146I/K241R, I12V/T63P/S103L/V146I/S232G/K241R, I12V/S103L/E180L/K241R, I12V/S103L/E180V/K241R, I12V/S103V/V146I/K241R, I12V/S103V/E180L/K241R, I12V/S103V/E180V/K241R, 112V/V146I, I12V/V146I/E180L/K241R, I12V/V146I/S232G/K241R, I12V/V146I/K241R, I12V/E180L, I12V/E180L/S232G/K241R, I12V/E180L/K241R, I12V/E180V, I12V/E180V/S232G/K241R, I12V/E180V/K241R, I12V/K241R, L18V, S43M/T63P/S103L/E180V/S232G/K241R, S43M/S103L/V146I/E180V, S43M/S103L/E180V, S43M/S103L/E180V/K241R, S43M/S103V/V146I/E180V, S43M/E180L/S232G, S43Q/S103L/E180V/S232G/K241R, S43Q/S103V/V146I/E180L, S43Q/S103V/E180L/K241R, S43Q/S103V/E180V/S232G/K241R, T63P/S103L/E180L/S232G, S103A, S103L, S103L/V146I/E180V, S103L/V146I/E180V/K241R, S103L/E180L, S103L/E180V/K241R, S103L/K241R, S103N, S103T, S103V/V146I/E180L/K241R, S103V/E180V/K241R, Y118L, Y118V, K119H, S122H, T144H, T144V, A145V, V146I/E180L/K241R, A154R, N160L, R172C, R172L, R172V, E180L/S232G, E180L/K241R, E180V/S232G, E180V/S232G/K241R, Q208F, S211F, and R212P.

[0145] In some embodiments, the engineered nitroaldolase comprises an amino acid sequence having at least 80%, 85%, 86%, 87%, 88%, 89%, 90%, 91%, 92%, 93%, 94%, 95%, 96%, 97%, 98%, 99% or more sequence identity to reference sequence SEQ ID NO: 1120 and one or more residue differences as compared to SEQ ID NO: 1120, selected from: 3, 7, 7/158, 7/158/175, 7/158/197/202, 27/43/115/172, 27/43/172, 29, 32, 43/110/115/172, 44, 46, 48/172, 55, 59, 67, 71, 72, 73, 94/103/118/146, 103, 103/144/146/172/180, 103/146/154/172/180/232, 103/154, 118, 118/144/215, 118/172/180, 137, 142, 146, 146/154, 154, 158, 172/190, 184, 198, 205, 216, 223, 226, 229, 247, 261, and 263. In some embodiments, the engineered nitroaldolase comprises an amino acid sequence having at least 80%, 85%, 86%, 87%, 88%, 89%, 90%, 91%, 92%, 93%, 94%, 95%, 96%, 97%, 98%, 99% or more sequence identity to reference sequence SEQ ID NO: 1120 and one or more residue differences as compared to SEQ ID NO: 1120, selected from: 3D, 7V, 7V/158Y, 7V/158Y/175P, 7V/158Y/197V/202I, 27E/43I/115S/172L, 27E/43I/172L, 29G, 29R, 32G, 32R, 43I/110T/115S/172L, 44S, 46H, 46V, 48I/172L, 55A, 55G, 55R, 55S, 59G, 59T, 67N, 71S, 72G, 73R, 94Q/103L/118V/146I, 103L, 103L/144V/146I/172L/180V, 103L/146I/154R/172L/180V/232G, 103L/154R, 118V, 118V/144V/215H, 118V/172L/180V, 137M, 137R, 142V, 146I, 146I/154R, 154R, 158Y, 172L/190S, 184S, 198L, 205G, 205L, 216M, 216V, 223A, 223C, 223E, 223L, 223M, 223S, 226L, 226V, 229L, 229V, 229W, 247V, 261G, 261H, 263E, 263G, 263L, and 263S. In some embodiments, the engineered nitroaldolase polypeptide comprises an amino acid sequence having at least 80%, 85%, 86%, 87%, 88%, 89%, 90%, 91%, 92%, 93%, 94%, 95%, 96%, 97%, 98%, 99% or more sequence identity to reference sequence SEQ ID NO: 1120 and one or more residue differences as compared to SEQ ID NO: 1120, selected from: S3D, I7V, I7V/F158Y, I7V/F158Y/K175P, I7V/F158Y/I197V/V202I, Q27E/S43I/A115S/R172L, Q27E/S43I/R172L, A29G, A29R, N32G, N32R, S43I/I110T/A115S/R172L, N44S, R46H, R46V, L48I/R172L, E55A, E55G, E55R, E55S, E59G, E59T, S67N, G71S, K72G, K73R, P94Q/V103L/Y118V/V146I, V103L, V103L/T144V/V146I/R172L/L180V, V103L/V146I/A154R/R172L/L180V/S232G, V103L/A154R, Y118V, Y118V/T144V/Q215H, Y118V/R172L/L180V, T137M, T137R, T142V, V146I, V146I/A154R, A154R, F158Y, R172L/T190S, D184S, R198L, E205G, E205L, L216M, L216V, K223A, K223C, K223E, K223L, K223M, K223S, K226L, K226V, C229L, C229V, C229W, Q247V, A261G, A261H, A263E, A263G, A263L, and A263S.

[0146] In some embodiments, the engineered nitroaldolase comprises an amino acid sequence having at least 80%, 85%, 86%, 87%, 88%, 89%, 90%, 91%, 92%, 93%, 94%, 95%, 96%, 97%, 98%, 99% or more sequence identity to reference sequence SEQ ID NO: 1120 and one or more residue differences as compared to SEQ ID NO: 1120, selected from: 73, 80, 103/146/209, 103/172/209, 118/119/172/209, 135, 144/209/232, 172/180/209, 181, and 223. In some embodiments, the engineered nitroaldolase comprises an amino acid sequence having at least 80%, 85%, 86%, 87%, 88%, 89%, 90%, 91%, 92%, 93%, 94%, 95%, 96%, 97%, 98%, 99% or more sequence identity to reference sequence SEQ ID NO: 1120 and one or more residue differences as compared to SEQ ID NO: 1120, selected from: 73R, 80A, 80G, 103L/146I/209C, 103L/172C/209C, 118V/119H/172C/209C, 135V, 144V/209C/232G, 172C/180V/209C, 181S, and 223E. In some embodiments, the engineered nitroaldolase polypeptide comprises an amino acid sequence having at least 80%, 85%, 86%, 87%, 88%, 89%, 90%, 91%, 92%, 93%, 94%, 95%, 96%, 97%, 98%, 99% or more sequence identity to reference sequence SEQ ID NO: 1120 and one or more residue differences as compared to SEQ ID NO: 1120, selected from: K73R, S80A, S80G, V103L/V146I/I209C, V103L/R172C/I209C, Y118V/K119H/R172C/I209C, N135V, T144V/I209C/S232G, R172C/L180V/I209C, Q181S, and K223E.

[0147] In some embodiments, the engineered nitroaldolase comprises an amino acid sequence having at least 80%, 85%, 86%, 87%, 88%, 89%, 90%, 91%, 92%, 93%, 94%, 95%, 96%, 97%, 98%, 99% or more sequence identity to reference sequence SEQ ID NO: 1348 and one or more residue differences as compared to SEQ ID NO: 1348, selected from: 2, 7/46, 39, 46, 46/55, 46/55/72, 46/55/92, 46/55/118, 46/55/226/257/263, 46/55/263, 46/70, 46/70/92/118/261/263, 46/70/175/263, 46/72, 46/118, 55/257/261, 55/261/263, 55/263, 105, 118, 118/226/261/263, and 263. In some embodiments, the engineered nitroaldolase comprises an amino acid sequence having at least 80%, 85%, 86%, 87%, 88%, 89%, 90%, 91%, 92%, 93%, 94%, 95%, 96%, 97%, 98%, 99% or more sequence identity to reference sequence SEQ ID NO: 1348 and one or more residue differences as compared to SEQ ID NO: 1348, selected from: 2G, 7V/46H, 39F, 39G, 39M, 39Q, 39S, 39T, 39V, 46H, 46H/55R, 46H/55R/72C, 46H/55R/92A, 46H/55R/118V, 46H/55R/226V/257Q/263L, 46H/55R/263L, 46H/70N, 46H/70N/92A/118V/261G/263L, 46H/70N/175P/263G, 46H/72C, 46H/118V, 55R/257Q/261G, 55R/261G/263I, 55R/263G, 105G, 118V, 118V/226V/261G/263I, and 263G. In some embodiments, the engineered nitroaldolase polypeptide comprises an amino acid sequence having at least 80%, 85%, 86%, 87%, 88%, 89%, 90%, 91%, 92%, 93%, 94%, 95%, 96%, 97%, 98%, 99% or more sequence identity to reference sequence SEQ ID NO: 1348 and one or more residue differences as compared to SEQ ID NO: 1348, selected from: V2G, I7V/R46H, W39F, W39G, W39M, W39Q, W39S, W39T, W39V, R46H, R46H/E55R, R46H/E55R/K72C, R46H/E55R/K92A, R46H/E55R/Y118V, R46H/E55R/K226V/S257Q/A263L, R46H/E55R/A263L, R46H/E70N, R46H/E70N/K92A/Y118V/A261G/A263L, R46H/E70N/K175P/A263G, R46H/K72C, R46H/Y118V, E55R/S257Q/A261G, E55R/A261G/A263I, E55R/A263G, A105G, Y118V, Y118V/K226V/A261G/A263I, and A263G.

[0148] In some embodiments, the engineered nitroaldolase comprises an amino acid sequence having at least 80%, 85%, 86%, 87%, 88%, 89%, 90%, 91%, 92%, 93%, 94%, 95%, 96%, 97%, 98%, 99% or more sequence identity to reference sequence SEQ ID NO: 1348 and one or more residue differences as compared to SEQ ID NO: 1348, selected from: 2, 7/46, 7/46/175, 22/46/55/118, 27/46/72, 27/46/146/158/202, 27/46/175, 27/118, 29/70/118, 39, 46, 46/55, 46/55/59/261/263, 46/55/72, 46/55/92, 46/55/118, 46/55/118/263, 46/55/146, 46/55/146/202, 46/55/226/257/263, 46/55/263, 46/70, 46/70/92/118/261/263, 46/70/175/263, 46/72, 46/92, 46/92/175, 46/118, 46/146, 46/146/257/263, 55/70/118, 55/257/261, 55/257/263, 55/261/263, 55/263, 70, 92/118, 105, 118, 118/226/261/263, 146/257/263, 146/261/263, 192/257/261, 202, 257/261/263, 261/263, and 263. In some embodiments, the engineered nitroaldolase comprises an amino acid sequence having at least 80%, 85%, 86%, 87%, 88%, 89%, 90%, 91%, 92%, 93%, 94%, 95%, 96%, 97%, 98%, 99% or more sequence identity to reference sequence SEQ ID NO: 1348 and one or more residue differences as compared to SEQ ID NO: 1348, selected from: 2G, 7V/46H, 7V/46H/175P, 22V/46H/55R/118V, 27G/46H/72C, 27G/46H/146I/158Y/202I, 27G/46H/175P, 27G/118V, 29V/70N/118V, 39M, 39Q, 39S, 39T, 39V, 46H, 46H/55R, 46H/55R/59T/261G/263L, 46H/55R/72C, 46H/55R/92A, 46H/55R/118V, 46H/55R/118V/263S, 46H/55R/146I, 46H/55R/146I/202I, 46H/55R/226V/257Q/263L, 46H/55R/263L, 46H/70N, 46H/70N/92A/118V/261G/263L, 46H/70N/175P/263G, 46H/72C, 46H/92A, 46H/92A/175P, 46H/118V, 46H/146I, 46H/146I/257Q/263I, 55R/70N/118V, 55R/257Q/261G, 55R/257Q/263L, 55R/261G/263I, 55R/263G, 70N, 92A/118V, 105G, 118V, 118V/226V/261G/263I, 146I/257Q/263S, 146I/261G/263L, 192V/257Q/261G, 202I, 257Q/261G/263G, 261G/263I, and 263G. In some embodiments, the engineered nitroaldolase polypeptide comprises an amino acid sequence having at least 80%, 85%, 86%, 87%, 88%, 89%, 90%, 91%, 92%, 93%, 94%, 95%, 96%, 97%, 98%, 99% or more sequence identity to reference sequence SEQ ID NO: 1348 and one or more residue differences as compared to SEQ ID NO: 1348, selected from: V2G, I7V/R46H, I7V/R46H/K175P, L22V/R46H/E55R/Y118V, Q27G/R46H/K72C, Q27G/R46H/V146I/F158Y/V202I, Q27G/R46H/K175P, Q27G/Y118V, A29V/E70N/Y118V, W39M, W39Q, W39S, W39T, W39V, R46H, R46H/E55R, R46H/E55R/E59T/A261G/A263L, R46H/E55R/K72C, R46H/E55R/K92A, R46H/E55R/Y118V, R46H/E55R/Y118V/A263S, R46H/E55R/V146I, R46H/E55R/V146I/V202I, R46H/E55R/K226V/S257Q/A263L, R46H/E55R/A263L, R46H/E70N, R46H/E70N/K92A/Y118V/A261G/A263L, R46H/E70N/K175P/A263G, R46H/K72C, R46H/K92A, R46H/K92A/K175P, R46H/Y118V, R46H/V146I, R46H/V146I/S257Q/A263I, E55R/E70N/Y118V, E55R/S257Q/A261G, E55R/S257Q/A263L, E55R/A261G/A263I, E55R/A263G, E70N, K92A/Y118V, A105G, Y118V, Y118V/K226V/A261G/A263I, V146I/S257Q/A263S, V146I/A261G/A263L, E192V/S257Q/A261G, V202I, S257Q/A261G/A263G, A261G/A263I, and A263G.

[0149] As will be appreciated by the skilled artisan, in some embodiments, one or a combination of residue differences above that is selected can be kept constant (i.e., maintained) in the engineered nitroaldolase as a core feature, and additional residue differences at other residue positions incorporated into the sequence to generate additional engineered nitroaldolase polypeptides with improved properties. Accordingly, it is to be understood for any engineered nitroaldolase containing one or a subset of the residue differences above, the present invention contemplates other engineered nitroaldolases that comprise the one or subset of the residue differences, and additionally one or more residue differences at the other residue positions disclosed herein.

[0150] As noted above, the engineered nitroaldolase polypeptides are also capable of converting substrates (e.g., compound (1) and compound (2)) to products (e.g., compound (3)). In some embodiments, the engineered nitroaldolase polypeptide is capable of converting the substrate compounds to the product compound with at least 1.2 fold, 1.5 fold, 2 fold, 3 fold, 4 fold, 5 fold, 10 fold, 20 fold, 30 fold, 40 fold, 50 fold, 60 fold, 70 fold, 80 fold, 90 fold, 100 fold, or more activity relative to the activity of the reference polypeptide of SEQ ID NO: 2, 24, 496, 860, 1120, or 1348.

[0151] In some embodiments, the engineered nitroaldolase polypeptide capable of converting the substrate compounds to the product compounds with at least 2 fold the activity relative to SEQ ID NO: 2, 24, 496, 860, 1120, or 1348, comprises an amino acid sequence selected from: the even-numbered sequences in SEQ ID NOs: 4-1484.

[0152] In some embodiments, the engineered nitroaldolase polypeptide is capable of converting the substrate compounds to the product compound with stereoselectivity towards the (S)-product as compared to the reference polypeptide of SEQ ID NO: 2, 24, 496, 860, 1120, or 1348. In some embodiments, the engineered nitroaldolase polypeptide is capable of converting the substrate compounds to the product compound with stereoselectivity towards the (S)-product of at least 30%, 40%, 50%, 60%, 70%, 80%, 90%, 95% or greater (as measured by the amount of (S)-product to the total amount of product).

[0153] In some embodiments, the engineered nitroaldolase polypeptide capable of converting the substrate compounds to the product compounds with stereoselectivity towards the (S)-product of at least 30%, 40%, 50%, 60%, 70%, 80%, 90%, 95% or greater comprises an amino acid sequence selected from: the even-numbered sequences in SEQ ID NOs: 4-1484.

[0154] In some embodiments, the engineered nitroaldolase has an amino acid sequence comprising one or more residue differences as compared to SEQ ID NO: 2, 24, 496, 860, 1120, or 1348, increases expression of the engineered nitroaldolase activity in a bacterial host cell, particularly in E. coli.

[0155] In some embodiments, the engineered nitroaldolase polypeptide with improved properties has an amino acid sequence comprising a sequence selected from the even-numbered sequences in the range of SEQ ID NOs: 4-1484.

[0156] In some embodiments, the engineered nitroaldolase, comprises an amino acid sequence having at least 80%, 85%, 86%, 87%, 88%, 89%, 90%, 91%, 92%, 93%, 94%, 95%, 96%, 97%, 98%, or 99% identity to one of the even-numbered sequences in the range of SEQ ID NOs: 4-1484, and the amino acid residue differences as compared to SEQ ID NO: 2, 24, 496, 860, 1120, or 1348, present in any one of the even-numbered sequences in the range of SEQ ID NOs: 4-1484, as provided in the Examples.

[0157] In addition to the residue positions specified above, any of the nitroaldolase polypeptides disclosed herein can further comprise other residue differences relative to SEQ ID NOs: 2, 24, 496, 860, 1120, and/or 1348, at other residue positions (i.e., residue positions other than those included herein). Residue differences at these other residue positions can provide for additional variations in the amino acid sequence without adversely affecting the ability of the polypeptide to carry out the conversion of substrate to product. Accordingly, in some embodiments, in addition to the amino acid residue differences present in any one of the engineered nitroaldolase polypeptides selected from the even-numbered sequences in the range of SEQ ID NOs: 4-1484, the sequence can further comprise 1-2, 1-3, 1-4, 1-5, 1-6, 1-7, 1-8, 1-9, 1-10, 1-11, 1-12, 1-14, 1-15, 1-16, 1-18, 1-20, 1-22, 1-24, 1-26, 1-30, 1-35, 1-40, 1-45, or 1-50 residue differences at other amino acid residue positions as compared to the SEQ ID NO: 2, 24, 496, 860, 1120, or 1348. In some embodiments, the number of amino acid residue differences as compared to the reference sequence can be 1, 2, 3, 4, 5, 6, 7, 8, 9, 10, 11, 12, 13, 14, 15, 16, 17, 18, 19, 20, 21, 22, 23, 24, 25, 30, 30, 35, 40, 45 or 50 residue positions. In some embodiments, the number of amino acid residue differences as compared to the reference sequence can be 1, 2, 3, 4, 5, 6, 7, 8, 9, 10, 11, 12, 13, 14, 15, 16, 18, 20, 21, 22, 23, 24, or 25 residue positions. The residue differences at these other positions can be conservative changes or non-conservative changes. In some embodiments, the residue differences can comprise conservative substitutions and non-conservative substitutions as compared to the nitroaldolase polypeptide of SEQ ID NO: 2, 24, 496, 860, 1120, or 1348.

[0158] In some embodiments, the present invention also provides engineered polypeptides that comprise a fragment of any of the engineered nitroaldolase polypeptides described herein that retains the functional activity and/or improved property of that engineered nitroaldolase. Accordingly, in some embodiments, the present invention provides a polypeptide fragment capable of converting substrate to product under suitable reaction conditions, wherein the fragment comprises at least about 90%, 95%, 96%, 97%, 98%, or 99% of a full-length amino acid sequence of an engineered nitroaldolase of the present invention, such as an exemplary engineered nitroaldolase polypeptide selected from the even-numbered sequences in the range of SEQ ID NOs: 4-1484. In some embodiments, the engineered nitroaldolase can have an amino acid sequence comprising a deletion in any one of the nitroaldolase polypeptide sequences described herein, such as the exemplary engineered polypeptides of the even-numbered sequences in the range of SEQ ID NOs: 4-1484.

[0159] Thus, for each and every embodiment of the engineered nitroaldolases of the invention, the amino acid sequence can comprise deletions of one or more amino acids, 2 or more amino acids, 3 or more amino acids, 4 or more amino acids, 5 or more amino acids, 6 or more amino acids, 8 or more amino acids, 10 or more amino acids, 15 or more amino acids, or 20 or more amino acids, up to 10% of the total number of amino acids, up to 20% of the total number of amino acids, or up to 30% of the total number of amino acids of the nitroaldolase polypeptides, where the associated functional activity and/or improved properties of the engineered nitroaldolase described herein are maintained. In some embodiments, the deletions can comprise 1-2, 1-3, 1-4, 1-5, 1-6, 1-7, 1-8, 1-9, 1-10, 1-15, 1-20, 1-21, 1-22, 1-23, 1-24, 1-25, 1-30, 1-35, 1-40, 1-45, or 1-50 amino acid residues. In some embodiments, the number of deletions can be 1, 2, 3, 4, 5, 6, 7, 8, 9, 10, 11, 12, 13, 14, 15, 16, 17, 18, 19, 20, 21, 22, 23, 24, 25, 30, 30, 35, 40, 45, or 50 amino acid residues. In some embodiments, the deletions can comprise deletions of 1, 2, 3, 4, 5, 6, 7, 8, 9, 10, 11, 12, 13, 14, 15, 16, 18, 20, 21, 22, 23, 24, or 25 amino acid residues.

[0160] In some embodiments, the engineered nitroaldolase polypeptide described herein can have an amino acid sequence comprising an insertion as compared to any one of the engineered nitroaldolase polypeptides described herein, such as the exemplary engineered polypeptides of the even-numbered sequences in the range of SEQ ID NOs: 4-1484. Thus, for each and every embodiment of the nitroaldolase polypeptides of the disclosure, the insertions can comprise one or more amino acids, 2 or more amino acids, 3 or more amino acids, 4 or more amino acids, 5 or more amino acids, 6 or more amino acids, 8 or more amino acids, 10 or more amino acids, 15 or more amino acids, 20 or more amino acids, 30 or more amino acids, 40 or more amino acids, or 50 or more amino acids, where the associated functional activity and/or improved properties of the engineered nitroaldolase described herein is maintained. The insertions can be to amino or carboxy terminus, or internal portions of the nitroaldolase polypeptide.

[0161] In some embodiments, the engineered nitroaldolase herein can have an amino acid sequence comprising a sequence selected from the even-numbered sequences in the range of SEQ ID NOs: 4-1484, and optionally one or several (e.g., up to 3, 4, 5, or up to 10) amino acid residue deletions, insertions and/or substitutions. In some embodiments, the amino acid sequence has optionally 1-2, 1-3, 1-4, 1-5, 1-6, 1-7, 1-8, 1-9, 1-10, 1-15, 1-20, 1-21, 1-22, 1-23, 1-24, 1-25, 1-30, 1-35, 1-40, 1-45, or 1-50 amino acid residue deletions, insertions and/or substitutions. In some embodiments, the number of amino acid sequence has optionally 1, 2, 3, 4, 5, 6, 7, 8, 9, 10, 11, 12, 13, 14, 15, 16, 17, 18, 19, 20, 21, 22, 23, 24, 25, 30, 30, 35, 40, 45, or 50 amino acid residue deletions, insertions and/or substitutions. In some embodiments, the amino acid sequence has optionally 1, 2, 3, 4, 5, 6, 7, 8, 9, 10, 11, 12, 13, 14, 15, 16, 18, 20, 21, 22, 23, 24, or 25 amino acid residue deletions, insertions and/or substitutions. In some embodiments, the substitutions can be conservative or non-conservative substitutions.

[0162] In the above embodiments, the suitable reaction conditions for the engineered polypeptides are provided as described in the Examples herein.

[0163] In some embodiments, the polypeptides of the present invention are fusion polypeptides in which the engineered polypeptides are fused to other polypeptides, such as, by way of example and not limitation, antibody tags (e.g., myc epitope), purification sequences (e.g., His tags for binding to metals), and cell localization signals (e.g., secretion signals). Thus, the engineered polypeptides described herein can be used with or without fusions to other polypeptides.

[0164] It is to be understood that the polypeptides described herein are not restricted to the genetically encoded amino acids. In addition to the genetically encoded amino acids, the polypeptides described herein may be comprised, either in whole or in part, of naturally occurring and/or synthetic non-encoded amino acids. Certain commonly encountered non-encoded amino acids of which the polypeptides described herein may be comprised include, but are not limited to: the D-stereomers of the genetically-encoded amino acids; 2,3-diaminopropionic acid (Dpr); α-aminoisobutyric acid (Aib); ε-aminohexanoic acid (Aha); δ-aminovaleric acid (Ava); N-methylglycine or sarcosine (MeGly or Sar); ornithine (Orn); citrulline (Cit); t-butylalanine (Bua); t-butylglycine (Bug); N-methylisoleucine (MeIle); phenylglycine (Phg); cyclohexylalanine (Cha); norleucine (Nle); naphthylalanine (Nal); 2-chlorophenylalanine (Ocf); 3-chlorophenylalanine (Mcf); 4-chlorophenylalanine (Pcf); 2-fluorophenylalanine (Off); 3-fluorophenylalanine (Mff); 4-fluorophenylalanine (Pff); 2-bromophenylalanine (Obf); 3-bromophenylalanine (Mbf); 4-bromophenylalanine (Pbf); 2-methylphenylalanine (Omf); 3-methylphenylalanine (Mmf); 4-methylphenylalanine (Pmf); 2-nitrophenylalanine (Onf); 3-nitrophenylalanine (Mnf); 4-nitrophenylalanine (Pnf); 2-cyanophenylalanine (Ocf); 3-cyanophenylalanine (Mcf); 4-cyanophenylalanine (Pcf); 2-trifluoromethylphenylalanine (Otf); 3-trifluoromethylphenylalanine (Mtf); 4-trifluoromethylphenylalanine (Ptf); 4-aminophenylalanine (Paf); 4-iodophenylalanine (Pif); 4-aminomethylphenylalanine (Pamf); 2,4-dichlorophenylalanine (Opef); 3,4-dichlorophenylalanine (Mpcf); 2,4-difluorophenylalanine (Opff); 3,4-difluorophenylalanine (Mpff); pyrid-2-ylalanine (2pAla); pyrid-3-ylalanine (3pAla); pyrid-4-ylalanine (4pAla); naphth-1-ylalanine (lnAla); naphth-2-ylalanine (2nAla); thiazolylalanine (taAla); benzothienylalanine (bAla); thienylalanine (tAla); furylalanine (fAla); homophenylalanine (hPhe); homotyrosine (hTyr); homotryptophan (hTrp); pentafluorophenylalanine (5ff); styrylkalanine (sAla); authrylalanine (aAla); 3,3-diphenylalanine (Dfa); 3-amino-5-phenypentanoic acid (Afp); penicillamine (Pen); 1,2,3,4-tetrahydroisoquinoline-3-carboxylic acid (Tic); β-2-thienylalanine (Thi); methionine sulfoxide (Mso); N(w)-nitroarginine (nArg); homolysine (hLys); phosphonomethylphenylalanine (pmPhe); phosphoserine (pSer); phosphothreonine (pThr); homoaspartic acid (hAsp); homoglutanic acid (hGlu); 1-aminocyclopent-(2 or 3)-ene-4 carboxylic acid; pipecolic acid (PA), azetidine-3-carboxylic acid (ACA); 1-aminocyclopentane-3-carboxylic acid; allylglycine (aGly); propargylglycine (pgGly); homoalanine (hAla); norvaline (nVal); homoleucine (hLeu), homovaline (hVal); homoisoleucine (hIle); homoarginine (hArg); N-acetyl lysine (AcLys); 2,4-diaminobutyric acid (Dbu); 2,3-diaminobutyric acid (Dab); N-methylvaline (MeVal); homocysteine (hCys); homoserine (hSer); hydroxyproline (Hyp) and homoproline (hPro). Additional non-encoded amino acids of which the polypeptides described herein may be comprised will be apparent to those of skill in the art (See e.g., the various amino acids provided in Fasman, CRC Practical Handbook of Biochemistry and Molecular Biology, CRC Press, Boca Raton, FL, pp. 3-70 [1989], and the references cited therein, all of which are incorporated by reference). These amino acids may be in either the L- or D-configuration.

[0165] Those of skill in the art will recognize that amino acids or residues bearing side chain protecting groups may also comprise the polypeptides described herein. Non-limiting examples of such protected amino acids, which in this case belong to the aromatic category, include (protecting groups listed in parentheses), but are not limited to: Arg(tos), Cys(methylbenzyl), Cys (nitropyridinesulfenyl), Glu(δ-benzylester), Gln(xanthyl), Asn(N-δ-xanthyl), His(bom), His(benzyl), His(tos), Lys(finoc), Lys(tos), Ser(O-benzyl), Thr (O-benzyl) and Tyr(O-benzyl).

[0166] Non-encoding amino acids that are conformationally constrained of which the polypeptides described herein may be composed include, but are not limited to, N-methyl amino acids (L-configuration); 1-aminocyclopent-(2 or 3)-ene-4-carboxylic acid; pipecolic acid; azetidine-3-carboxylic acid; homoproline (hPro); and 1-aminocyclopentane-3-carboxylic acid.

[0167] In some embodiments, the engineered polypeptides can be in various forms, for example, such as an isolated preparation, as a substantially purified enzyme, whole cells transformed with gene(s) encoding the enzyme, and/or as cell extracts and/or lysates of such cells. The enzymes can be lyophilized, spray-dried, precipitated or be in the form of a crude paste, as further discussed below.

[0168] In some embodiments, the engineered polypeptides can be in the form of a biocatalytic composition. In some embodiments, the biocatalytic composition comprises (a) a means for conversion of a ketone compound and an alkane compound to a β-nitro alcohol intermediate by contact with a nitroaldolase polypeptide and (b) a suitable buffer. In some embodiments, the biocatalytic composition comprises a nitroaldolase having activity on a ketone substrate. In some further embodiments, the β-nitro alcohol intermediate is further reduced to a β-hydroxy-α-amino alcohol. In some embodiments, the biocatalytic composition comprises a sodium citrate buffer.

[0169] In some embodiments, the engineered polypeptides can be provided on a solid support, such as a membrane, resin, solid carrier, or other solid phase material. A solid support can be composed of organic polymers such as polystyrene, polyethylene, polypropylene, polyfluoroethylene, polyethyleneoxy, and polyacrylamide, as well as co-polymers and grafts thereof. A solid support can also be inorganic, such as glass, silica, controlled pore glass (CPG), reverse phase silica or metal, such as gold or platinum. The configuration of a solid support can be in the form of beads, spheres, particles, granules, a gel, a membrane or a surface. Surfaces can be planar, substantially planar, or non-planar. Solid supports can be porous or non-porous, and can have swelling or non-swelling characteristics. A solid support can be configured in the form of a well, depression, or other container, vessel, feature, or location.

[0170] In some embodiments, the engineered nitroaldolase polypeptides of the present invention can be immobilized on a solid support such that they retain their improved activity, and/or other improved properties relative to the reference polypeptide of SEQ ID NO: 2, 24, 496, 860, 1120, or 1348. In such embodiments, the immobilized polypeptides can facilitate the biocatalytic conversion of the substrate compounds or other suitable substrates to the product and after the reaction is complete are easily retained (e.g., by retaining beads on which polypeptide is immobilized) and then reused or recycled in subsequent reactions. Such immobilized enzyme processes allow for further efficiency and cost reduction. Accordingly, it is further contemplated that any of the methods of using the nitroaldolase polypeptides of the present invention can be carried out using the nitroaldolase polypeptides bound or immobilized on a solid support.

[0171] Methods of enzyme immobilization are well-known in the art. The engineered polypeptides can be bound non-covalently or covalently. Various methods for conjugation and immobilization of enzymes to solid supports (e.g., resins, membranes, beads, glass, etc.) are well known in the art (See e.g., Yi et al., Proc. Biochem., 42(5): 895-898 [2007]; Martin et al., Appl. Microbiol. Biotechnol., 76(4): 843-851 [2007]; Koszelewski et al., J. Mol. Cat. B: Enzymatic, 63: 39-44 [2010]; Truppo et al., Org. Proc. Res. Dev., published online: dx.doi.org/10.1021/op200157c; Hermanson, Bioconjugate Techniques, 2^{nd} ed., Academic Press, Cambridge, MA [2008]; Mateo et al., Biotechnol. Prog., 18(3):629-34 [2002]; and “Bioconjugation Protocols: Strategies and Methods,” In Methods in Molecular Biology, Niemeyer (ed.), Humana Press, New York, NY [2004]; the disclosures of each which are incorporated by reference herein). Solid supports useful for immobilizing the engineered nitroaldolase of the present invention include but are not limited to beads or resins comprising polymethacrylate with epoxide functional groups, polymethacrylate with amino epoxide functional groups, styrene/DVB copolymer or polymethacrylate with octadecyl functional groups. Exemplary solid supports useful for immobilizing the engineered nitroaldolase polypeptides of the present invention include, but are not limited to, chitosan beads, Eupergit C, and SEPABEADs (Mitsubishi), including the following different types of SEPABEAD: EC-EP, EC-HFA/S, EXA252, EXE119 and EXE120.

[0172] In some embodiments, the polypeptides described herein are provided in the form of kits. The enzymes in the kits may be present individually or as a plurality of enzymes. The kits can further include reagents for carrying out the enzymatic reactions, substrates for assessing the activity of enzymes, as well as reagents for detecting the products. The kits can also include reagent dispensers and instructions for use of the kits.

[0173] In some embodiments, the kits of the present invention include arrays comprising a plurality of different nitroaldolase polypeptides at different addressable position, wherein the different polypeptides are different variants of a reference sequence each having at least one different improved enzyme property. In some embodiments, a plurality of polypeptides immobilized on solid supports are configured on an array at various locations, addressable for robotic delivery of reagents, or by detection methods and/or instruments. The array can be used to test a variety of substrate compounds for conversion by the polypeptides. Such arrays comprising a plurality of engineered polypeptides and methods of their use are known in the art (See e.g., WO2009/008908A2).

### Polynucleotides Encoding Engineered Nitroaldolase, Expression Vectors and Host Cells

[0174] In another aspect, the present invention provides polynucleotides encoding the engineered nitroaldolase polypeptides described herein. The polynucleotides may be operatively linked to one or more heterologous regulatory sequences that control gene expression to create a recombinant polynucleotide capable of expressing the polypeptide. Expression constructs containing a heterologous polynucleotide encoding the engineered nitroaldolase are introduced into appropriate host cells to express the corresponding nitroaldolase polypeptide.

[0175] As will be apparent to the skilled artisan, availability of a protein sequence and the knowledge of the codons corresponding to the various amino acids provide a description of all the polynucleotides capable of encoding the subject polypeptides. The degeneracy of the genetic code, where the same amino acids are encoded by alternative or synonymous codons, allows an extremely large number of nucleic acids to be made, all of which encode the improved nitroaldolase enzymes. Thus, having knowledge of a particular amino acid sequence, those skilled in the art could make any number of different nucleic acids by simply modifying the sequence of one or more codons in a way which does not change the amino acid sequence of the protein. In this regard, the present invention specifically contemplates each and every possible variation of polynucleotides that could be made encoding the polypeptides described herein by selecting combinations based on the possible codon choices, and all such variations are to be considered specifically disclosed for any polypeptide described herein, including the amino acid sequences presented in Tables 2-1, 2-2, 3-1, 3-2, 4-1, 4-2, 5-1, 5-2, 6-1, 6-2, 7-1, and 7-2, and disclosed in the sequence listing incorporated by reference herein as the even-numbered sequences in the range of SEQ ID NOs: 4-1484.

[0176] In various embodiments, the codons are preferably selected to fit the host cell in which the protein is being produced. For example, preferred codons used in bacteria are used to express the gene in bacteria; preferred codons used in yeast are used for expression in yeast; and preferred codons used in mammals are used for expression in mammalian cells. In some embodiments, all codons need not be replaced to optimize the codon usage of the nitroaldolase since the natural sequence will comprise preferred codons and because use of preferred codons may not be required for all amino acid residues. Consequently, codon optimized polynucleotides encoding the nitroaldolase enzymes may contain preferred codons at about 40%, 50%, 60%, 70%, 80%, or greater than 90% of codon positions of the full length coding region.

[0177] In some embodiments, the polynucleotide comprises a codon optimized nucleotide sequence encoding the nitroaldolase polypeptide amino acid sequence, as represented by SEQ ID NO: 2, 24, 496, 860, 1120, or 1348. In some embodiments, the polynucleotide has a nucleic acid sequence comprising at least 80%, 85%, 90%, 91%, 92%, 93%, 94%, 95%, 96%, 97%, 98%, 99% or more identity to the codon optimized nucleic acid sequences encoding the even-numbered sequences in the range of SEQ ID NOs: 4-1484. In some embodiments, the polynucleotide has a nucleic acid sequence comprising at least 80%, 85%, 90%, 91%, 92%, 93%, 94%, 95%, 96%, 97%, 98%, 99% or more identity to the codon optimized nucleic acid sequences in the odd-numbered sequences in the range of SEQ ID NOs: 3-1483. In some embodiments, the codon optimized sequences of the odd-numbered sequences in the range of SEQ ID NOs: 3-1483, enhance expression of the encoded nitroaldolase, providing preparations of enzyme capable of converting substrate to product.

[0178] In some embodiments, the polynucleotides are capable of hybridizing under highly stringent conditions to a reference sequence selected from the odd-numbered sequences in SEQ ID NOs: 3-1483, or a complement thereof, and encode a nitroaldolase.

[0179] In some embodiments, as described above, the polynucleotide encodes an engineered nitroaldolase polypeptide with improved properties as compared to SEQ ID NO: 2, 24, 496, 860, 1120, or 1348, wherein the polypeptide comprises an amino acid sequence having at least 80%, 85%, 86%, 87%, 88%, 89%, 90%, 91%, 92%, 93%, 94%, 95%, 96%, 97%, 98%, 99% or more identity to a reference sequence selected from SEQ ID NO: 2, 24, 496, 860, 1120, or 1348, and one or more residue differences as compared to SEQ ID NO: 2, 24, 496, 860, 1120, or 1348, wherein the sequence is selected from the even-numbered sequences in the range of SEQ ID NOs: 4-1484. In some embodiments, the reference amino acid sequence is selected from the even-numbered sequences in the range of SEQ ID NOs: 4-1484. In some embodiments, the reference amino acid sequence is SEQ ID NO: 2, while in some other embodiments, the reference sequence is SEQ ID NO: 24, while in some other embodiments, the reference sequence is SEQ ID NO: 496. In some embodiments, the reference amino acid sequence is SEQ ID NO: 860, while in some other embodiments, the reference sequence is SEQ ID NO: 1120, while in some other embodiments, the reference sequence is SEQ ID NO: 1348.

[0180] In some embodiments, the polynucleotide encodes a nitroaldolase polypeptide capable of converting one or more substrates to product with improved properties as compared to SEQ ID NO: 2, 24, 496, 860, 1120, or 1348, wherein the polypeptide comprises an amino acid sequence having at least 80%, 85%, 86%, 87%, 88%, 89%, 90%, 91%, 92%, 93%, 94%, 95%, 96%, 97%, 98%, 99% or more sequence identity to reference sequence SEQ ID NO: 2, 24, 496, 860, 1120, or 1348.

[0181] In some embodiments, the polynucleotide encoding the engineered nitroaldolase comprises a polynucleotide sequence comprising at least 80%, 85%, 86%, 87%, 88%, 89%, 90%, 91%, 92%, 93%, 94%, 95%, 96%, 97%, 98%, 99%, or more sequence identity to SEQ ID NOs: 1, 23, 495, 860, 1119, and/or 1347. In some embodiments, the polynucleotide encoding the engineered nitroaldolase comprises a polynucleotide sequence comprising at least 80%, 85%, 86%, 87%, 88%, 89%, 90%, 91%, 92%, 93%, 94%, 95%, 96%, 97%, 98%, 99%, or more sequence identity to a sequence selected from the odd-numbered sequences in the range of SEQ ID NOs: 3-1483. In some embodiments, the polynucleotide encoding the engineered nitroaldolase comprises a polynucleotide sequence selected from the odd-numbered sequences in the range of SEQ ID NOs: 3-1483.

[0182] In some embodiments, the polynucleotides are capable of hybridizing under highly stringent conditions to a reference polynucleotide sequence selected from the odd-numbered sequences in the range of SEQ ID NOs: 3-1483, or a complement thereof, and encode a nitroaldolase polypeptide with one or more of the improved properties described herein. In some embodiments, the polynucleotide capable of hybridizing under highly stringent conditions encodes a nitroaldolase comprising an amino acid sequence having at least 80%, 85%, 86%, 87%, 88%, 89%, 90%, 91%, 92%, 93%, 94%, 95%, 96%, 97%, 98%, 99% or more identity to SEQ ID NO: 2, that has an amino acid sequence comprising one or more residue differences as compared to SEQ ID NO: 2, at residue positions selected from: 7/9, 7/9/33/68/72/158, 7/9/33/72/175/197/230, 7/9/33/72/230, 7/9/68/72/197, 7/9/158/175, 7/9/175, 7/9/197, 7/33, 7/68/72/175, 7/72, 7/72/97/175/230, 9, 9/11/33/72/197/230, 9/33/68/158/197, 9/33/72/230, 9/33/97/230, 9/68/72, 9/97/175/202/218, 9/175, 9/202, 11, 13, 14/33/68/72/97, 18, 18/33/68/97/158/175/239, 18/33/72/97/158/175, 18/33/72/97/158/239, 18/33/72/97/175/202, 18/33/72/175/202/237/239, 18/33/72/197/237, 18/68/72, 18/68/72/158/175/237/239, 18/68/72/175/202/239, 18/68/72/239, 18/68/175/223/237/239, 18/68/239, 18/72/97/175/237/239, 18/72/175/197, 18/72/237, 18/72/239, 18/97/175/237/239, 18/97/223/237/239, 18/175, 18/197/239, 18/239, 20/124, 33/68/72, 33/68/72/175/230, 33/68/223/239, 33/72, 33/72/97/197, 33/72/175, 33/175, 39, 44/97, 52, 68/72, 68/72/97, 68/72/97/197, 68/72/197, 68/72/197/239, 68/97/175, 68/97/175/197/223, 72/97/158/223/237, 72/175/197, 97/158/175/197, 97/175, 103, 121, 122, 124, 125, 128, 133, 148, 175, 197, and 197/202.

[0183] In some embodiments, the polynucleotides are capable of hybridizing under highly stringent conditions to a reference polynucleotide sequence selected from the odd-numbered sequences in the range of SEQ ID NOs: 3-1483, or a complement thereof, and encode a nitroaldolase polypeptide with one or more of the improved properties described herein. In some embodiments, the polynucleotide capable of hybridizing under highly stringent conditions encodes a nitroaldolase comprising an amino acid sequence having at least 80%, 85%, 86%, 87%, 88%, 89%, 90%, 91%, 92%, 93%, 94%, 95%, 96%, 97%, 98%, 99% or more identity to SEQ ID NO: 2, that has an amino acid sequence comprising one or more residue differences as compared to SEQ ID NO: 2, at residue positions selected from: 7/11/33/72/97, 7/11/33/97, 7/11/72, 7/11/158, 7/11/237, 7/33/72/97/158/175/197/237/239, 9/11/33, 9/11/33/72, 9/11/72, 9/33/68/97/237/239, 9/72/97/158/237/239, 9/218/239, 10, 11, 12, 13, 14, 18, 33/68/72/97/237/239, 33/72/158/239, 39, 40, 41, 48, 49, 51, 54, 54/126, 57, 68/175/239, 82, 84, 85, 86, 103, 104, 105, 107, 115, 117, 119, 119/120, 120, 122, 123, 124, 127, 130, 131, 133, 134, 137/145, 144, 145, 146, 147, 148, 149, 150, 152, 157, 158, 159, 169, 173, 174, 175, 180, 181, 183, 203, 204, 208, 209, 210, 215, 218, 236, and 237.

[0184] In some embodiments, the polynucleotides are capable of hybridizing under highly stringent conditions to a reference polynucleotide sequence selected from the odd-numbered sequences in the range of SEQ ID NOs: 3-1483, or a complement thereof, and encode a nitroaldolase polypeptide with one or more of the improved properties described herein. In some embodiments, the polynucleotide capable of hybridizing under highly stringent conditions encodes a nitroaldolase comprising an amino acid sequence having at least 80%, 85%, 86%, 87%, 88%, 89%, 90%, 91%, 92%, 93%, 94%, 95%, 96%, 97%, 98%, 99% or more identity to SEQ ID NO: 24, that has an amino acid sequence comprising one or more residue differences as compared to SEQ ID NO: 24, at residue positions selected from: 9/39/122/157, 18, 18/33/39/230, 18/33/175, 18/39/44/118, 18/175, 20, 33/39, 33/39/44/118/121, 33/39/44/121, 33/39/44/152, 33/39/44/175, 33/39/44/197, 33/39/44/210/230, 33/39/118/121/175, 33/39/121/175, 33/39/197/210, 33/39/210, 33/39/210/230, 33/118/121, 33/118/121/175, 39, 39/44/103, 39/44/118, 39/44/152/230, 39/44/175/197/230, 39/103, 39/103/125, 39/103/125/127/146, 39/103/125/127/146/150, 39/103/125/146, 39/103/127/150, 39/103/150, 39/118/121, 39/197, 39/197/210, 43, 44/103, 81, 103, 103/125/127, 103/125/146, 103/127, 103/150, 118/121, 118/121/175, 118/121/197, 121, 152, 152/197, 154, 159, 163, 175, 210, 232, and 238.

[0185] In some embodiments, the polynucleotides are capable of hybridizing under highly stringent conditions to a reference polynucleotide sequence selected from the odd-numbered sequences in the range of SEQ ID NOs: 3-1483, or a complement thereof, and encode a nitroaldolase polypeptide with one or more of the improved properties described herein. In some embodiments, the polynucleotide capable of hybridizing under highly stringent conditions encodes a nitroaldolase comprising an amino acid sequence having at least 80%, 85%, 86%, 87%, 88%, 89%, 90%, 91%, 92%, 93%, 94%, 95%, 96%, 97%, 98%, 99% or more identity to SEQ ID NO: 24, that has an amino acid sequence comprising one or more residue differences as compared to SEQ ID NO: 24, at residue positions selected from: 7, 9/13, 9/13/39, 9/13/39/68/72/239, 9/13/39/68/239, 9/13/39/72/122, 9/13/39/97/239, 9/13/68/72/97/239, 9/13/68/97/134/239, 9/13/68/97/239, 9/13/72, 9/13/134, 11, 12/42/125/127, 12/103, 12/103/150, 13, 13/39, 13/39/68, 13/39/68/72/97, 13/39/72/97/122/134/223, 13/39/97/239, 13/39/239, 13/68, 13/68/72/97/122/239, 16, 18/33/39/44/118/121/175/197/210, 18/33/39/44/121, 18/33/39/112/118/121/197, 18/33/39/121, 18/33/39/121/175, 18/33/39/121/175/197, 18/33/39/121/175/210, 18/33/39/121/210, 18/33/118/121, 18/33/121, 18/33/121/197, 18/33/121/210/230, 18/39/44/118/121/230, 18/39/44/121/175/210, 18/39/118/121, 18/39/118/121/210, 18/39/121/175, 18/39/121/175/210, 18/39/121/197/210, 18/118/121, 18/118/121/175, 18/118/121/210, 18/118/121/230, 18/121, 18/121/175, 18/121/210, 18/121/230, 20, 21, 33/39/44/118/121, 33/39/44/118/121/210/230, 33/39/44/121, 33/39/44/121/152, 33/39/44/121/175/210, 33/39/44/121/230, 33/39/73/121/197, 33/39/118/121/175, 33/39/118/121/175/230, 33/39/121, 33/39/121/175, 33/39/121/210/230, 33/118/121, 33/118/121/175, 33/118/121/197, 33/121, 33/121/230, 37/91, 39/44/118/121/175/210, 39/68/72/239, 39/118/121, 39/118/121/210, 39/121, 39/121/210/230, 43, 44, 76, 79, 101, 118/121, 118/121/175, 118/121/197, 121, 121/175/230, 121/210, 148, 153, 159, 161, 172, 200, 207, 233, 245, and 248.

[0186] In some embodiments, the polynucleotides are capable of hybridizing under highly stringent conditions to a reference polynucleotide sequence selected from the odd-numbered sequences in the range of SEQ ID NOs: 3-1483, or a complement thereof, and encode a nitroaldolase polypeptide with one or more of the improved properties described herein. In some embodiments, the polynucleotide capable of hybridizing under highly stringent conditions encodes a nitroaldolase comprising an amino acid sequence having at least 80%, 85%, 86%, 87%, 88%, 89%, 90%, 91%, 92%, 93%, 94%, 95%, 96%, 97%, 98%, 99% or more identity to SEQ ID NO: 496, that has an amino acid sequence comprising one or more residue differences as compared to SEQ ID NO: 496, at residue positions selected from: 43/103, 43/103/172/238, 43/103/238/241, 43/238, 81/232, 103, 103/159/238, 103/194/238, 103/238, 122, 232, 238, and 238/241.

[0187] In some embodiments, the polynucleotides are capable of hybridizing under highly stringent conditions to a reference polynucleotide sequence selected from the odd-numbered sequences in the range of SEQ ID NOs: 3-1483, or a complement thereof, and encode a nitroaldolase polypeptide with one or more of the improved properties described herein. In some embodiments, the polynucleotide capable of hybridizing under highly stringent conditions encodes a nitroaldolase comprising an amino acid sequence having at least 80%, 85%, 86%, 87%, 88%, 89%, 90%, 91%, 92%, 93%, 94%, 95%, 96%, 97%, 98%, 99% or more identity to SEQ ID NO: 496, that has an amino acid sequence comprising one or more residue differences as compared to SEQ ID NO: 496, at residue positions selected from: 12, 43, 43/47/103, 43/47/103/232, 43/103, 43/103/121/172/241, 43/103/172, 43/103/172/238, 43/103/238, 43/103/238/241, 43/121, 43/194/238, 43/238, 44/103/121/238, 44/103/238, 44/103/238/241, 44/121/238/241, 47/103, 63, 103, 103/121, 103/121/172/238, 103/159/238, 103/172/238, 103/194/238, 103/238, 122, 131, 146, 178, 180, and 221.

[0188] In some embodiments, the polynucleotides are capable of hybridizing under highly stringent conditions to a reference polynucleotide sequence selected from the odd-numbered sequences in the range of SEQ ID NOs: 3-1483, or a complement thereof, and encode a nitroaldolase polypeptide with one or more of the improved properties described herein. In some embodiments, the polynucleotide capable of hybridizing under highly stringent conditions encodes a nitroaldolase comprising an amino acid sequence having at least 80%, 85%, 86%, 87%, 88%, 89%, 90%, 91%, 92%, 93%, 94%, 95%, 96%, 97%, 98%, 99% or more identity to SEQ ID NO: 860, that has an amino acid sequence comprising one or more residue differences as compared to SEQ ID NO: 860, at residue positions selected from: 12, 12/43/63/103/146/180/232/241, 12/43/63/103/146/241, 12/43/81/103/241, 12/43/81/146/232/241, 12/43/81/180/241, 12/43/81/232/241, 12/43/81/241, 12/43/103, 12/43/103/146/180/232/241, 12/43/103/146/180/241, 12/43/103/180/241, 12/43/103/241, 12/43/146/180/232/241, 12/43/180/241, 12/63/81/103/241, 12/81, 12/81/180/241, 12/103/146/241, 12/103/180/241, 12/146, 12/146/180/241, 12/180/232/241, 12/241, 18, 43/81/232/241, 43/103/146/180, 43/103/180/241, 43/103/241, 43/180/232, 43/232/241, 63/103/180/232, 78, 81, 81/103/146, 81/146/180/241, 81/146/241, 81/180/241, 84, 103, 103/146, 103/146/180, 103/146/180/241, 103/180, 103/180/241, 103/261, 144, 145, 146/180/232, 146/180/241, 146/241, 150, 166, 172, 180/232, 232/241, and 241.

[0189] In some embodiments, the polynucleotides are capable of hybridizing under highly stringent conditions to a reference polynucleotide sequence selected from the odd-numbered sequences in the range of SEQ ID NOs: 3-1483, or a complement thereof, and encode a nitroaldolase polypeptide with one or more of the improved properties described herein. In some embodiments, the polynucleotide capable of hybridizing under highly stringent conditions encodes a nitroaldolase comprising an amino acid sequence having at least 80%, 85%, 86%, 87%, 88%, 89%, 90%, 91%, 92%, 93%, 94%, 95%, 96%, 97%, 98%, 99% or more identity to SEQ ID NO: 860, that has an amino acid sequence comprising one or more residue differences as compared to SEQ ID NO: 860, at residue positions selected from: 9, 12, 12/43/63/103/146/180/232/241, 12/43/63/103/146/241, 12/43/103/146/180/232/241, 12/43/103/146/180/241, 12/43/103/146/232/241, 12/43/103/146/241, 12/43/103/180/241, 12/43/146/180/232/241, 12/43/146/241, 12/43/180/232, 12/43/180/241, 12/63/103/146/232/241, 12/103/146/241, 12/103/180/241, 12/146, 12/146/180/241, 12/146/232/241, 12/146/241, 12/180, 12/180/232/241, 12/180/241, 12/241, 18, 43/63/103/180/232/241, 43/103/146/180, 43/103/180, 43/103/180/232/241, 43/103/180/241, 43/180/232, 63/103/180/232, 103, 103/146/180, 103/146/180/241, 103/180, 103/180/241, 103/241, 118, 119, 122, 144, 145, 146/180/241, 154, 160, 172, 180/232, 180/232/241, 180/241, 208, 211, and 212.

[0190] In some embodiments, the polynucleotides are capable of hybridizing under highly stringent conditions to a reference polynucleotide sequence selected from the odd-numbered sequences in the range of SEQ ID NOs: 3-1483, or a complement thereof, and encode a nitroaldolase polypeptide with one or more of the improved properties described herein. In some embodiments, the polynucleotide capable of hybridizing under highly stringent conditions encodes a nitroaldolase comprising an amino acid sequence having at least 80%, 85%, 86%, 87%, 88%, 89%, 90%, 91%, 92%, 93%, 94%, 95%, 96%, 97%, 98%, 99% or more identity to SEQ ID NO: 1120, that has an amino acid sequence comprising one or more residue differences as compared to SEQ ID NO: 1120, at residue positions selected from: 3, 7, 7/158, 7/158/175, 7/158/197/202, 27/43/115/172, 27/43/172, 29, 32, 43/110/115/172, 44, 46, 48/172, 55, 59, 67, 71, 72, 73, 94/103/118/146, 103, 103/144/146/172/180, 103/146/154/172/180/232, 103/154, 118, 118/144/215, 118/172/180, 137, 142, 146, 146/154, 154, 158, 172/190, 184, 198, 205, 216, 223, 226, 229, 247, 261, and 263.

[0191] In some embodiments, the polynucleotides are capable of hybridizing under highly stringent conditions to a reference polynucleotide sequence selected from the odd-numbered sequences in the range of SEQ ID NOs: 3-1483, or a complement thereof, and encode a nitroaldolase polypeptide with one or more of the improved properties described herein. In some embodiments, the polynucleotide capable of hybridizing under highly stringent conditions encodes a nitroaldolase comprising an amino acid sequence having at least 80%, 85%, 86%, 87%, 88%, 89%, 90%, 91%, 92%, 93%, 94%, 95%, 96%, 97%, 98%, 99% or more identity to SEQ ID NO: 1120, that has an amino acid sequence comprising one or more residue differences as compared to SEQ ID NO: 1120, at residue positions selected from: 73, 80, 103/146/209, 103/172/209, 118/119/172/209, 135, 144/209/232, 172/180/209, 181, and 223.

[0192] In some embodiments, the polynucleotides are capable of hybridizing under highly stringent conditions to a reference polynucleotide sequence selected from the odd-numbered sequences in the range of SEQ ID NOs: 3-1483, or a complement thereof, and encode a nitroaldolase polypeptide with one or more of the improved properties described herein. In some embodiments, the polynucleotide capable of hybridizing under highly stringent conditions encodes a nitroaldolase comprising an amino acid sequence having at least 80%, 85%, 86%, 87%, 88%, 89%, 90%, 91%, 92%, 93%, 94%, 95%, 96%, 97%, 98%, 99% or more identity to SEQ ID NO: 1348, that has an amino acid sequence comprising one or more residue differences as compared to SEQ ID NO: 1348, at residue positions selected from: 2, 7/46, 39, 46, 46/55, 46/55/72, 46/55/92, 46/55/118, 46/55/226/257/263, 46/55/263, 46/70, 46/70/92/118/261/263, 46/70/175/263, 46/72, 46/118, 55/257/261, 55/261/263, 55/263, 105, 118, 118/226/261/263, and 263.

[0193] In some embodiments, the polynucleotides are capable of hybridizing under highly stringent conditions to a reference polynucleotide sequence selected from the odd-numbered sequences in the range of SEQ ID NOs: 3-1483, or a complement thereof, and encode a nitroaldolase polypeptide with one or more of the improved properties described herein. In some embodiments, the polynucleotide capable of hybridizing under highly stringent conditions encodes a nitroaldolase comprising an amino acid sequence having at least 80%, 85%, 86%, 87%, 88%, 89%, 90%, 91%, 92%, 93%, 94%, 95%, 96%, 97%, 98%, 99% or more identity to SEQ ID NO: 1348, that has an amino acid sequence comprising one or more residue differences as compared to SEQ ID NO: 1348, at residue positions selected from: 2, 7/46, 7/46/175, 22/46/55/118, 27/46/72, 27/46/146/158/202, 27/46/175, 27/118, 29/70/118, 39, 46, 46/55, 46/55/59/261/263, 46/55/72, 46/55/92, 46/55/118, 46/55/118/263, 46/55/146, 46/55/146/202, 46/55/226/257/263, 46/55/263, 46/70, 46/70/92/118/261/263, 46/70/175/263, 46/72, 46/92, 46/92/175, 46/118, 46/146, 46/146/257/263, 55/70/118, 55/257/261, 55/257/263, 55/261/263, 55/263, 70, 92/118, 105, 118, 118/226/261/263, 146/257/263, 146/261/263, 192/257/261, 202, 257/261/263, 261/263, and 263.

[0194] In some embodiments, the polynucleotide capable of hybridizing under highly stringent conditions encodes an engineered nitroaldolase polypeptide with improved properties comprising an amino acid sequence having at least 80%, 85%, 86%, 87%, 88%, 89%, 90%, 91%, 92%, 93%, 94%, 95%, 96%, 97%, 98%, 99% or more identity to SEQ ID NO: 2, 24, 496, 860, 1120, or 1348. In some embodiments, the polynucleotides encode the polypeptides described herein but have at least about 80%, 85%, 86%, 87%, 88%, 89%, 90%, 91%, 92%, 93%, 94%, 95%, 96%, 97%, 98%, or 99% or more sequence identity at the nucleotide level to a reference polynucleotide encoding the engineered nitroaldolase. In some embodiments, the reference polynucleotide sequence is selected from SEQ ID NOs: 3-1483.

[0195] In some embodiments, the polynucleotide capable of hybridizing under highly stringent conditions encodes an engineered nitroaldolase polypeptide with improved properties comprising an amino acid sequence having at least 80%, 85%, 86%, 87%, 88%, 89%, 90%, 91%, 92%, 93%, 94%, 95%, 96%, 97%, 98%, 99% or more identity to SEQ ID NO: 2. In some embodiments, the polynucleotides encode the polypeptides described herein but have at least about 80%, 85%, 86%, 87%, 88%, 89%, 90%, 91%, 92%, 93%, 94%, 95%, 96%, 97%, 98%, or 99% or more sequence identity at the nucleotide level to a reference polynucleotide encoding the engineered nitroaldolase. In some embodiments, the reference polynucleotide sequence is selected from SEQ ID NOs: 3-461.

[0196] In some embodiments, the polynucleotide capable of hybridizing under highly stringent conditions encodes an engineered nitroaldolase polypeptide with improved properties comprising an amino acid sequence having at least 80%, 85%, 86%, 87%, 88%, 89%, 90%, 91%, 92%, 93%, 94%, 95%, 96%, 97%, 98%, 99% or more identity to SEQ ID NO: 24. In some embodiments, the polynucleotides encode the polypeptides described herein but have at least about 80%, 85%, 86%, 87%, 88%, 89%, 90%, 91%, 92%, 93%, 94%, 95%, 96%, 97%, 98%, or 99% or more sequence identity at the nucleotide level to a reference polynucleotide encoding the engineered nitroaldolase. In some embodiments, the reference polynucleotide sequence is selected from SEQ ID NOs: 459-841.

[0197] In some embodiments, the polynucleotide capable of hybridizing under highly stringent conditions encodes an engineered nitroaldolase polypeptide having with improved properties comprising an amino acid sequence having at least 80%, 85%, 86%, 87%, 88%, 89%, 90%, 91%, 92%, 93%, 94%, 95%, 96%, 97%, 98%, 99% or more identity to SEQ ID NO: 496. In some embodiments, the polynucleotides encode the polypeptides described herein but have at least about 80%, 85%, 86%, 87%, 88%, 89%, 90%, 91%, 92%, 93%, 94%, 95%, 96%, 97%, 98%, or 99% or more sequence identity at the nucleotide level to a reference polynucleotide encoding the engineered nitroaldolase. In some embodiments, the reference polynucleotide sequence is selected from SEQ ID NOs: 843-979.

[0198] In some embodiments, the polynucleotide capable of hybridizing under highly stringent conditions encodes an engineered nitroaldolase polypeptide having with improved properties comprising an amino acid sequence having at least 80%, 85%, 86%, 87%, 88%, 89%, 90%, 91%, 92%, 93%, 94%, 95%, 96%, 97%, 98%, 99% or more identity to SEQ ID NO: 860. In some embodiments, the polynucleotides encode the polypeptides described herein but have at least about 80%, 85%, 86%, 87%, 88%, 89%, 90%, 91%, 92%, 93%, 94%, 95%, 96%, 97%, 98%, or 99% or more sequence identity at the nucleotide level to a reference polynucleotide encoding the engineered nitroaldolase. In some embodiments, the reference polynucleotide sequence is selected from SEQ ID NOs: 981-1211.

[0199] In some embodiments, the polynucleotide capable of hybridizing under highly stringent conditions encodes an engineered nitroaldolase polypeptide having with improved properties comprising an amino acid sequence having at least 80%, 85%, 86%, 87%, 88%, 89%, 90%, 91%, 92%, 93%, 94%, 95%, 96%, 97%, 98%, 99% or more identity to SEQ ID NO: 1120. In some embodiments, the polynucleotides encode the polypeptides described herein but have at least about 80%, 85%, 86%, 87%, 88%, 89%, 90%, 91%, 92%, 93%, 94%, 95%, 96%, 97%, 98%, or 99% or more sequence identity at the nucleotide level to a reference polynucleotide encoding the engineered nitroaldolase. In some embodiments, the reference polynucleotide sequence is selected from SEQ ID NOs: 1213-1365.

[0200] In some embodiments, the polynucleotide capable of hybridizing under highly stringent conditions encodes an engineered nitroaldolase polypeptide having with improved properties comprising an amino acid sequence having at least 80%, 85%, 86%, 87%, 88%, 89%, 90%, 91%, 92%, 93%, 94%, 95%, 96%, 97%, 98%, 99% or more identity to SEQ ID NO: 1348. In some embodiments, the polynucleotides encode the polypeptides described herein but have at least about 80%, 85%, 86%, 87%, 88%, 89%, 90%, 91%, 92%, 93%, 94%, 95%, 96%, 97%, 98%, or 99% or more sequence identity at the nucleotide level to a reference polynucleotide encoding the engineered nitroaldolase. In some embodiments, the reference polynucleotide sequence is selected from SEQ ID NOs: 1367-1483.

[0201] In some embodiments, an isolated polynucleotide encoding any of the engineered nitroaldolase polypeptides provided herein is manipulated in a variety of ways to provide for expression of the polypeptide. In some embodiments, the polynucleotides encoding the polypeptides are provided as expression vectors where one or more control sequences is present to regulate the expression of the polynucleotides and/or polypeptides. Manipulation of the isolated polynucleotide prior to its insertion into a vector may be desirable or necessary depending on the expression vector. The techniques for modifying polynucleotides and nucleic acid sequences utilizing recombinant DNA methods are well known in the art.

[0202] In some embodiments, the control sequences include among other sequences, promoters, leader sequences, polyadenylation sequences, propeptide sequences, signal peptide sequences, and transcription terminators. As known in the art, suitable promoters can be selected based on the host cells used. For bacterial host cells, suitable promoters for directing transcription of the nucleic acid constructs of the present application, include, but are not limited to the promoters obtained from the E. coli lac operon, Streptomyces coelicolor agarase gene (dagA), Bacillus subtilis levansucrase gene (sacB), Bacillus licheniformis alpha-amylase gene (amyL), Bacillus stearothermophilus maltogenic amylase gene (amyM), Bacillus amyloliquefaciens alpha-amylase gene (amyQ), Bacillus licheniformis penicillinase gene (penP), Bacillus subtilis xylA and xylB genes, and prokaryotic beta-lactamase gene (See e.g., Villa-Kamaroff et al., Proc. Natl Acad. Sci. USA 75: 3727-3731 [1978]), as well as the tac promoter (See e.g., DeBoer et al., Proc. Natl Acad. Sci. USA 80: 21-25 [1983]). Exemplary promoters for filamentous fungal host cells, include promoters obtained from the genes for Aspergillus oryzae TAKA amylase, Rhizomucor miehei aspartic proteinase, Aspergillus niger neutral alpha-amylase, Aspergillus niger acid stable alpha-amylase, Aspergillus niger or Aspergillus awamori glucoamylase (glaA), Rhizomucor miehei lipase, Aspergillus oryzae alkaline protease, Aspergillus oryzae triose phosphate isomerase, Aspergillus nidulans acetamidase, and Fusarium oxysporum trypsin-like protease (See e.g., WO 96/00787), as well as the NA2-tpi promoter (a hybrid of the promoters from the genes for Aspergillus niger neutral alpha-amylase and Aspergillus oryzae triose phosphate isomerase), and mutant, truncated, and hybrid promoters thereof. Exemplary yeast cell promoters can be from the genes can be from the genes for Saccharomyces cerevisiae enolase (ENO-1), Saccharomyces cerevisiae galactokinase (GAL1), Saccharomyces cerevisiae alcohol dehydrogenase/glyceraldehyde-3-phosphate dehydrogenase (ADH2/GAP), and Saccharomyces cerevisiae 3-phosphoglycerate kinase. Other useful promoters for yeast host cells are known in the art (See e.g., Romanos et al., Yeast 8:423-488 [1992]).

[0203] In some embodiments, the control sequence is a suitable transcription terminator sequence, a sequence recognized by a host cell to terminate transcription. The terminator sequence is operably linked to the 3′ terminus of the nucleic acid sequence encoding the polypeptide. Any terminator which is functional in the host cell of choice finds use in the present invention. For example, exemplary transcription terminators for filamentous fungal host cells can be obtained from the genes for Aspergillus oryzae TAKA amylase, Aspergillus niger glucoamylase, Aspergillus nidulans anthranilate synthase, Aspergillus niger alpha-glucosidase, and Fusarium oxysporum trypsin-like protease. Exemplary terminators for yeast host cells can be obtained from the genes for Saccharomyces cerevisiae enolase, Saccharomyces cerevisiae cytochrome C (CYC1), and Saccharomyces cerevisiae glyceraldehyde-3-phosphate dehydrogenase. Other useful terminators for yeast host cells are known in the art (See e.g., Romanos et al., supra).

[0204] In some embodiments, the control sequence is a suitable leader sequence, a non-translated region of an mRNA that is important for translation by the host cell. The leader sequence is operably linked to the 5′ terminus of the nucleic acid sequence encoding the polypeptide. Any leader sequence that is functional in the host cell of choice may be used. Exemplary leaders for filamentous fungal host cells are obtained from the genes for Aspergillus oryzae TAKA amylase and Aspergillus nidulans triose phosphate isomerase. Suitable leaders for yeast host cells include, but are not limited to those obtained from the genes for Saccharomyces cerevisiae enolase (ENO-1), Saccharomyces cerevisiae 3-phosphoglycerate kinase, Saccharomyces cerevisiae alpha-factor, and Saccharomyces cerevisiae alcohol dehydrogenase/glyceraldehyde-3-phosphate dehydrogenase (ADH2/GAP). The control sequence may also be a polyadenylation sequence, a sequence operably linked to the 3′ terminus of the nucleic acid sequence and which, when transcribed, is recognized by the host cell as a signal to add polyadenosine residues to transcribed mRNA. Any polyadenylation sequence which is functional in the host cell of choice may be used in the present invention. Exemplary polyadenylation sequences for filamentous fungal host cells include, but are not limited to those from the genes for Aspergillus oryzae TAKA amylase, Aspergillus niger glucoamylase, Aspergillus nidulans anthranilate synthase, Fusarium oxysporum trypsin-like protease, and Aspergillus niger alpha-glucosidase. Useful polyadenylation sequences for yeast host cells are also known in the art (See e.g., Guo and Sherman, Mol. Cell. Bio., 15:5983-5990 [1995]).

[0205] In some embodiments, the control sequence is a signal peptide coding region that codes for an amino acid sequence linked to the amino terminus of a polypeptide and directs the encoded polypeptide into the cell's secretory pathway. The 5′ end of the coding sequence of the nucleic acid sequence may inherently contain a signal peptide coding region naturally linked in translation reading frame with the segment of the coding region that encodes the secreted polypeptide. Alternatively, the 5′ end of the coding sequence may contain a signal peptide coding region that is foreign to the coding sequence. Any signal peptide coding region that directs the expressed polypeptide into the secretory pathway of a host cell of choice finds use for expression of the engineered nitroaldolase polypeptides provided herein. Effective signal peptide coding regions for bacterial host cells include, but are not limited to the signal peptide coding regions obtained from the genes for Bacillus NC1B 11837 maltogenic amylase, Bacillus stearothermophilus alpha-amylase, Bacillus licheniformis subtilisin, Bacillus licheniformis beta-lactamase, Bacillus stearothermophilus neutral proteases (nprT, nprS, nprM), and Bacillus subtilis prsA. Further signal peptides are known in the art (See e.g., Simonen and Palva, Microbiol. Rev., 57:109-137 [1993]). Effective signal peptide coding regions for filamentous fungal host cells include, but are not limited to the signal peptide coding regions obtained from the genes for Aspergillus oryzae TAKA amylase, Aspergillus niger neutral amylase, Aspergillus niger glucoamylase, Rhizomucor miehei aspartic proteinase, Humicola insolens cellulase, and Humicola lanuginosa lipase. Useful signal peptides for yeast host cells include, but are not limited to those from the genes for Saccharomyces cerevisiae alpha-factor and Saccharomyces cerevisiae invertase.

[0206] In some embodiments, the control sequence is a propeptide coding region that codes for an amino acid sequence positioned at the amino terminus of a polypeptide. The resultant polypeptide is referred to as a “proenzyme,” “propolypeptide,” or “zymogen,” in some cases). A propolypeptide can be converted to a mature active polypeptide by catalytic or autocatalytic cleavage of the propeptide from the propolypeptide. The propeptide coding region includes, but is not limited to the genes for Bacillus subtilis alkaline protease (aprE), Bacillus subtilis neutral protease (nprT), Saccharomyces cerevisiae alpha-factor, Rhizomucor miehei aspartic proteinase, and Myceliophthora thermophila lactase (See e.g., WO 95/33836). Where both signal peptide and propeptide regions are present at the amino terminus of a polypeptide, the propeptide region is positioned next to the amino terminus of a polypeptide and the signal peptide region is positioned next to the amino terminus of the propeptide region.

[0207] In some embodiments, regulatory sequences are also utilized. These sequences facilitate the regulation of the expression of the polypeptide relative to the growth of the host cell. Examples of regulatory systems are those which cause the expression of the gene to be turned on or off in response to a chemical or physical stimulus, including the presence of a regulatory compound. In prokaryotic host cells, suitable regulatory sequences include, but are not limited to the lac, tac, and trp operator systems. In yeast host cells, suitable regulatory systems include, but are not limited to the ADH2 system or GAL1 system. In filamentous fungi, suitable regulatory sequences include, but are not limited to the TAKA alpha-amylase promoter, Aspergillus niger glucoamylase promoter, and Aspergillus oryzae glucoamylase promoter.

[0208] The present invention also provides recombinant expression vectors comprising a polynucleotide encoding an engineered nitroaldolase polypeptide, and one or more expression regulating regions such as a promoter and a terminator, a replication origin, etc., depending on the type of hosts into which they are to be introduced. In some embodiments, the various nucleic acid and control sequences described above are combined together to produce a recombinant expression vector which includes one or more convenient restriction sites to allow for insertion or substitution of the nucleic acid sequence encoding the variant nitroaldolase polypeptide at such sites. Alternatively, the polynucleotide sequence(s) of the present invention are expressed by inserting the polynucleotide sequence or a nucleic acid construct comprising the polynucleotide sequence into an appropriate vector for expression. In creating the expression vector, the coding sequence is located in the vector so that the coding sequence is operably linked with the appropriate control sequences for expression.

[0209] The recombinant expression vector may be any vector (e.g., a plasmid or virus), that can be conveniently subjected to recombinant DNA procedures and can result in the expression of the variant nitroaldolase polynucleotide sequence. The choice of the vector will typically depend on the compatibility of the vector with the host cell into which the vector is to be introduced. The vectors may be linear or closed circular plasmids.

[0210] In some embodiments, the expression vector is an autonomously replicating vector (i.e., a vector that exists as an extra-chromosomal entity, the replication of which is independent of chromosomal replication, such as a plasmid, an extra-chromosomal element, a minichromosome, or an artificial chromosome). The vector may contain any means for assuring self-replication. In some alternative embodiments, the vector may be one which, when introduced into the host cell, is integrated into the genome and replicated together with the chromosome(s) into which it has been integrated. Furthermore, a single vector or plasmid or two or more vectors or plasmids which together contain the total DNA to be introduced into the genome of the host cell, or a transposon may be used.

[0211] In some embodiments, the expression vector preferably contains one or more selectable markers, which permit easy selection of transformed cells. A “selectable marker” is a gene the product of which provides for biocide or viral resistance, resistance to heavy metals, prototrophy to auxotrophy, and the like. Examples of bacterial selectable markers include, but are not limited to the dal genes from Bacillus subtilis or Bacillus licheniformis, or markers, which confer antibiotic resistance such as ampicillin, kanamycin, chloramphenicol or tetracycline resistance. Suitable markers for yeast host cells include, but are not limited to ADE2, HIS3, LEU2, LYS2, MET3, TRP1, and URA3. Selectable markers for use in a filamentous fungal host cell include, but are not limited to, amdS (acetamidase), argB (ornithine carbamoyltransferases), bar (phosphinothricin acetyltransferase), hph (hygromycin phosphotransferase), niaD (nitrate reductase), pyrG (orotidine-5′-phosphate decarboxylase), sC (sulfate adenyltransferase), and trpC (anthranilate synthase), as well as equivalents thereof. In another aspect, the present invention provides a host cell comprising a polynucleotide encoding at least one engineered nitroaldolase polypeptide of the present invention, the polynucleotide being operatively linked to one or more control sequences for expression of the engineered nitroaldolase enzyme(s) in the host cell. Host cells for use in expressing the polypeptides encoded by the expression vectors of the present invention are well known in the art and include but are not limited to, bacterial cells, such as E. coli, Vibriofluvialis, Streptomyces and Salmonella typhimurium cells; fungal cells, such as yeast cells (e.g., Saccharomyces cerevisiae and Pichia pastoris [ATCC Accession No. 201178]); insect cells such as Drosophila S2 and Spodoptera Sf9 cells; animal cells such as CHO, COS, BHK, 293, and Bowes melanoma cells; and plant cells. Exemplary host cells are Escherichia coli strains (e.g., W3110 (ΔfhuA) and BL21).

[0212] Accordingly, in another aspect, the present invention provides methods for producing the engineered nitroaldolase polypeptides, where the methods comprise culturing a host cell capable of expressing a polynucleotide encoding the engineered nitroaldolase polypeptide under conditions suitable for expression of the polypeptide. In some embodiments, the methods further comprise the steps of isolating and/or purifying the nitroaldolase polypeptides, as described herein.

[0213] Appropriate culture media and growth conditions for the above-described host cells are well known in the art. Polynucleotides for expression of the nitroaldolase polypeptides may be introduced into cells by various methods known in the art. Techniques include, among others, electroporation, biolistic particle bombardment, liposome mediated transfection, calcium chloride transfection, and protoplast fusion.

[0214] The engineered nitroaldolases with the properties disclosed herein can be obtained by subjecting the polynucleotide encoding the naturally occurring or engineered nitroaldolase polypeptide to mutagenesis and/or directed evolution methods known in the art, and as described herein. An exemplary directed evolution technique is mutagenesis and/or DNA shuffling (See e.g., Stemmer, Proc. Natl. Acad. Sci. USA 91:10747-10751 [1994]; WO 95/22625; WO 97/0078; WO 97/35966; WO 98/27230; WO 00/42651; WO 01/75767 and U.S. Pat. No. 6,537,746). Other directed evolution procedures that can be used include, among others, staggered extension process (StEP), in vitro recombination (See e.g., Zhao et al., Nat. Biotechnol., 16:258-261 [1998]), mutagenic PCR (See e.g., Caldwell et al., PCR Methods Appl., 3:S136-S140 [1994]), and cassette mutagenesis (See e.g., Black et al., Proc. Natl. Acad. Sci. USA 93:3525-3529 [1996]).

[0215] For example, mutagenesis and directed evolution methods can be readily applied to polynucleotides to generate variant libraries that can be expressed, screened, and assayed. Mutagenesis and directed evolution methods are well known in the art (See e.g., U.S. Pat. Nos. 5,605,793, 5,811,238, 5,830,721, 5,834,252, 5,837,458, 5,928,905, 6,096,548, 6,117,679, 6,132,970, 6,165,793, 6,180,406, 6,251,674, 6,265,201, 6,277,638, 6,287,861, 6,287,862, 6,291,242, 6,297,053, 6,303,344, 6,309,883, 6,319,713, 6,319,714, 6,323,030, 6,326,204, 6,335,160, 6,335,198, 6,344,356, 6,352,859, 6,355,484, 6,358,740, 6,358,742, 6,365,377, 6,365,408, 6,368,861, 6,372,497, 6,337,186, 6,376,246, 6,379,964, 6,387,702, 6,391,552, 6,391,640, 6,395,547, 6,406,855, 6,406,910, 6,413,745, 6,413,774, 6,420,175, 6,423,542, 6,426,224, 6,436,675, 6,444,468, 6,455,253, 6,479,652, 6,482,647, 6,483,011, 6,484,105, 6,489,146, 6,500,617, 6,500,639, 6,506,602, 6,506,603, 6,518,065, 6,519,065, 6,521,453, 6,528,311, 6,537,746, 6,573,098, 6,576,467, 6,579,678, 6,586,182, 6,602,986, 6,605,430, 6,613,514, 6,653,072, 6,686,515, 6,703,240, 6,716,631, 6,825,001, 6,902,922, 6,917,882, 6,946,296, 6,961,664, 6,995,017, 7,024,312, 7,058,515, 7,105,297, 7,148,054, 7,220,566, 7,288,375, 7,384,387, 7,421,347, 7,430,477, 7,462,469, 7,534,564, 7,620,500, 7,620,502, 7,629,170, 7,702,464, 7,747,391, 7,747,393, 7,751,986, 7,776,598, 7,783,428, 7,795,030, 7,853,410, 7,868,138, 7,783,428, 7,873,477, 7,873,499, 7,904,249, 7,957,912, 7,981,614, 8,014,961, 8,029,988, 8,048,674, 8,058,001, 8,076,138, 8,108,150, 8,170,806, 8,224,580, 8,377,681, 8,383,346, 8,457,903, 8,504,498, 8,589,085, 8,762,066, 8,768,871, 9,593,326, and all related US, as well as PCT and non-US counterparts; Ling et al., Anal. Biochem., 254(2):157-78 [1997]; Dale et al., Meth. Mol. Biol., 57:369-74 [1996]; Smith, Ann. Rev. Genet., 19:423-462 [1985]; Botstein et al., Science, 229:1193-1201 [1985]; Carter, Biochem. J., 237:1-7 [1986]; Kramer et al., Cell, 38:879-887 [1984]; Wells et al., Gene, 34:315-323 [1985]; Minshull et al., Curr. Op. Chem. Biol., 3:284-290 [1999]; Christians et al., Nat. Biotechnol., 17:259-264 [1999]; Crameri et al., Nature, 391:288-291 [1998]; Crameri, et al., Nat. Biotechnol., 15:436-438 [1997]; Zhang et al., Proc. Nat. Acad. Sci. U.S.A., 94:4504-4509 [1997]; Crameri et al., Nat. Biotechnol., 14:315-319 [1996]; Stemmer, Nature, 370:389-391 [1994]; Stemmer, Proc. Nat. Acad. Sci. USA, 91:10747-10751 [1994]; WO 95/22625; WO 97/0078; WO 97/35966; WO 98/27230; WO 00/42651; WO 01/75767; and WO 2009/152336, all of which are incorporated herein by reference).

[0216] In some embodiments, the enzyme clones obtained following mutagenesis treatment are screened by subjecting the enzymes to a defined temperature (or other assay conditions, such as testing the enzyme's activity over a broad range of substrates) and measuring the amount of enzyme activity remaining after heat treatments or other assay conditions. Clones containing a polynucleotide encoding a nitroaldolase polypeptide are then sequenced to identify the nucleotide sequence changes (if any), and used to express the enzyme in a host cell. Measuring enzyme activity from the expression libraries can be performed using any suitable method known in the art (e.g., standard biochemistry techniques, such as HPLC analysis).

[0217] In some embodiments, the clones obtained following mutagenesis treatment can be screened for engineered nitroaldolases having one or more desired improved enzyme properties (e.g., improved regioselectivity). Measuring enzyme activity from the expression libraries can be performed using the standard biochemistry techniques, such as GC analysis, HPLC analysis and/or derivatization of products (pre or post separation), for example, using dansyl chloride or OPA (See e.g., Yaegaki et al., J Chromatogr. 356(1):163-70 [1986]).

[0218] When the sequence of the engineered polypeptide is known, the polynucleotides encoding the enzyme can be prepared by standard solid-phase methods, according to known synthetic methods. In some embodiments, fragments of up to about 100 bases can be individually synthesized, then joined (e.g., by enzymatic or chemical ligation methods, or polymerase mediated methods) to form any desired continuous sequence. For example, polynucleotides and oligonucleotides encoding portions of the nitroaldolase can be prepared by chemical synthesis as known in the art (e.g., the classical phosphoramidite method of Beaucage et al., Tet. Lett. 22:1859-69 [1981], or the method described by Matthes et al., EMBO J. 3:801-05 [1984]) as typically practiced in automated synthetic methods. According to the phosphoramidite method, oligonucleotides are synthesized (e.g., in an automatic DNA synthesizer), purified, annealed, ligated and cloned in appropriate vectors. In addition, essentially any nucleic acid can be obtained from any of a variety of commercial sources. In some embodiments, additional variations can be created by synthesizing oligonucleotides containing deletions, insertions, and/or substitutions, and combining the oligonucleotides in various permutations to create engineered nitroaldolases with improved properties.

[0219] Accordingly, in some embodiments, a method for preparing the engineered nitroaldolase polypeptide comprises: (a) synthesizing a polynucleotide encoding a polypeptide comprising an amino acid sequence having at least about 80%, 85%, 86%, 87%, 88%, 89%, 90%, 91%, 92%, 93%, 94%, 95%, 96%, 97%, 98%, or 99% or more sequence identity to an amino acid sequence selected from the even-numbered sequences of SEQ ID NOs: 4-1484, and having one or more residue differences as compared to SEQ ID NO: 2, 24, 496, 860, 1120, or 1348; and (b) expressing the nitroaldolase polypeptide encoded by the polynucleotide.

[0220] In some embodiments of the method, the polynucleotide encodes an engineered nitroaldolase that has optionally one or several (e.g., up to 3, 4, 5, or up to 10) amino acid residue deletions, insertions and/or substitutions. In some embodiments, the amino acid sequence has optionally 1-2, 1-3, 1-4, 1-5, 1-6, 1-7, 1-8, 1-9, 1-10, 1-15, 1-20, 1-21, 1-22, 1-23, 1-24, 1-25, 1-30, 1-35, 1-40, 1-45, or 1-50 amino acid residue deletions, insertions and/or substitutions. In some embodiments, the amino acid sequence has optionally 1, 2, 3, 4, 5, 6, 7, 8, 9, 10, 11, 12, 13, 14, 15, 16, 17, 18, 19, 20, 21, 22, 23, 24, 25, 30, 30, 35, 40, 45, or 50 amino acid residue deletions, insertions and/or substitutions. In some embodiments, the amino acid sequence has optionally 1, 2, 3, 4, 5, 6, 7, 8, 9, 10, 11, 12, 13, 14, 15, 16, 18, 20, 21, 22, 23, 24, or 25 amino acid residue deletions, insertions and/or substitutions. In some embodiments, the substitutions can be conservative or non-conservative substitutions.

[0221] In some embodiments, any of the engineered nitroaldolase enzymes expressed in a host cell can be recovered from the cells and/or the culture medium using any one or more of the well-known techniques for protein purification, including, among others, lysozyme treatment, sonication, filtration, salting-out, ultra-centrifugation, and chromatography. Suitable solutions for lysing and the high efficiency extraction of proteins from bacteria, such as E. coli, are commercially available (e.g., CelLytic B™ Sigma-Aldrich, St. Louis MO).

[0222] Chromatographic techniques for isolation of the nitroaldolase polypeptide include, among others, reverse phase chromatography high performance liquid chromatography, ion exchange chromatography, gel electrophoresis, and affinity chromatography. Conditions for purifying a particular enzyme will depend, in part, on factors such as net charge, hydrophobicity, hydrophilicity, molecular weight, molecular shape, etc., and will be apparent to those having skill in the art.

[0223] In some embodiments, affinity techniques may be used to isolate the improved nitroaldolase enzymes. For affinity chromatography purification, any antibody which specifically binds the nitroaldolase polypeptide may be used. For the production of antibodies, various host animals, including but not limited to rabbits, mice, rats, etc., may be immunized by injection with a nitroaldolase polypeptide, or a fragment thereof. The nitroaldolase polypeptide or fragment may be attached to a suitable carrier, such as BSA, by means of a side chain functional group or linkers attached to a side chain functional group. In some embodiments, the affinity purification can use a specific ligand bound by the nitroaldolase or dye affinity column (See e.g., EP0641862; Stellwagen, “Dye Affinity Chromatography,” In Current Protocols in Protein Science, Unit 9.2-9.2.16 [2001]).

### Methods of Using the Engineered Nitroaldolase Enzymes

[0224] In some embodiments, the nitroaldolase enzymes described herein find use in processes for conversion of one or more suitable substrates to a product.

[0225] In another aspect, the engineered nitroaldolase polypeptides disclosed herein can be used in a process for the conversion of the substrate compound (1), or structural analogs thereof, and of the substrate compound (2), or structural analogs thereof, to the product of compound (3) or the corresponding structural analog.

[0226] Structural analogs of compound (1) include other ketones with halogen modifications and/or ketones with various modifications at the alpha carbons. Structural analogs of compound (2) include other alkanes with nitro groups or other nitro containing compounds with an available α-hydrogen. Structural analogs of compound (3) include various β-nitro alcohols.

[0227] In some embodiments, the present disclosure provides a process of preparing compound (3);

[chemical structure]

[0228] the process comprising a step of contacting a substrate of compound (1)

[chemical structure]

[0229] with a substrate of compound (2)

[chemical structure]

with an engineered nitroaldolase polypeptide as disclosed herein under suitable reaction conditions, such that a product of compound (3) is prepared.

[0230] In the embodiments provided herein and illustrated in the Examples, various ranges of suitable reaction conditions that can be used in the processes, include but are not limited to, substrate loading, co-substrate loading, pH, temperature, buffer, solvent system, polypeptide loading, and reaction time. Further suitable reaction conditions for carrying out the process for biocatalytic conversion of substrate compounds to product compounds using an engineered nitroaldolase described herein can be readily optimized in view of the guidance provided herein by routine experimentation that includes, but is not limited to, contacting the engineered nitroaldolase polypeptide and one or more substrate compounds under experimental reaction conditions of concentration, pH, temperature, and solvent conditions, and detecting the product compound.

[0231] The substrate compound(s) in the reaction mixtures can be varied, taking into consideration, for example, the desired amount of product compound, the effect of each substrate concentration on enzyme activity, stability of enzyme under reaction conditions, and the percent conversion of each substrate to product. In some embodiments, the suitable reaction conditions comprise a substrate compound loading for each of one of more substrates of at least about 0.5 to about 60 g/L, 1 to about 40 g/L, 20 to about 35 g/L, about 10 to about 25 g/L, or 25 to about 35 g/L. In some embodiments, the suitable reaction conditions comprise a substrate compound loading for each of one of more substrates of at least about 0.5 g/L, at least about 1 g/L, at least about 5 g/L, at least about 10 g/L, at least about 15 g/L, at least about 20 g/L, at least about 30 g/L, at least about 35 g/L, or at least about 40 g/L, or even greater.

[0232] In carrying out the nitroaldolase mediated processes described herein, the engineered polypeptide may be added to the reaction mixture in the form of a purified enzyme, partially purified enzyme, whole cells transformed with gene(s) encoding the enzyme, as cell extracts and/or lysates of such cells, and/or as an enzyme immobilized on a solid support. Whole cells transformed with gene(s) encoding the engineered nitroaldolase enzyme or cell extracts, lysates thereof, and isolated enzymes may be employed in a variety of different forms, including solid (e.g., lyophilized, spray-dried, and the like) or semisolid (e.g., a crude paste). The cell extracts or cell lysates may be partially purified by precipitation (ammonium sulfate, polyethyleneimine, heat treatment or the like, followed by a desalting procedure prior to lyophilization (e.g., ultrafiltration, dialysis, etc.). Any of the enzyme preparations (including whole cell preparations) may be stabilized by crosslinking using known crosslinking agents, such as, for example, glutaraldehyde or immobilization to a solid phase (e.g., Eupergit C, and the like).

[0233] The gene(s) encoding the engineered nitroaldolase polypeptides can be transformed into host cell separately or together into the same host cell. For example, in some embodiments one set of host cells can be transformed with gene(s) encoding one engineered nitroaldolase polypeptide and another set can be transformed with gene(s) encoding another engineered nitroaldolase polypeptide. Both sets of transformed cells can be utilized together in the reaction mixture in the form of whole cells, or in the form of lysates or extracts derived therefrom. In other embodiments, a host cell can be transformed with gene(s) encoding multiple engineered nitroaldolase polypeptides. In some embodiments the engineered polypeptides can be expressed in the form of secreted polypeptides and the culture medium containing the secreted polypeptides can be used for the nitroaldolase reaction.

[0234] In some embodiments, the improved activity and/or stereoselectivity of the engineered nitroaldolase polypeptides disclosed herein provides for processes wherein higher percentage conversion can be achieved with lower concentrations of the engineered polypeptide. In some embodiments of the process, the suitable reaction conditions comprise an engineered polypeptide amount of about 1% (w/w), 2% (w/w), 5% (w/w), 10% (w/w), 20% (w/w), 30% (w/w), 40% (w/w), 50% (w/w), 75% (w/w), 100% (w/w), 150% (w/w), 175% (w/w), 200% (w/w) or more of substrate compound loading.

[0235] In some embodiments, the engineered polypeptide is present at about 0.01 g/L to about 130 g/L; about 0.05 g/L to about 100 g/L; about 0.1 g/L to about 40 g/L; about 1 g/L to about 40 g/L; about 2 g/L to about 40 g/L; about 5 g/L to about 40 g/L; about 5 g/L to about 30 g/L; about 0.1 g/L to about 10 g/L; about 0.5 g/L to about 10 g/L; about 1 g/L to about 10 g/L; about 0.1 g/L to about 5 g/L; about 0.5 g/L to about 5 g/L; or about 0.1 g/L to about 2 g/L. In some embodiments, the nitroaldolase polypeptide is present at about 0.01 g/L, 0.05 g/L, 0.1 g/L, 0.2 g/L, 0.5 g/L, 1, 2 g/L, 5 g/L, 10 g/L, 15 g/L, 20 g/L, 25 g/L, 30 g/L, 35 g/L, 40 g/L, 50 g/L, 80 g/L, or 100 g/L.

[0236] During the course of the reaction, the pH of the reaction mixture may change. The pH of the reaction mixture may be maintained at a desired pH or within a desired pH range. This may be done by the addition of an acid or a base, before and/or during the course of the reaction. Alternatively, the pH may be controlled by using a buffer. Accordingly, in some embodiments, the reaction condition comprises a buffer. Suitable buffers to maintain desired pH ranges are known in the art and include, by way of example and not limitation, sodium citrate, borate, phosphate, 2-(N-morpholino)ethanesulfonic acid (MES), 3-(N-morpholino)propanesulfonic acid (MOPS), acetate, triethanolamine, and 2-amino-2-hydroxymethyl-propane-1,3-diol (Tris), and the like. In some embodiments, the reaction conditions comprise water as a suitable solvent with no buffer present.

[0237] In the embodiments of the process, the reaction conditions comprise a suitable pH. The desired pH or desired pH range can be maintained by use of an acid or base, an appropriate buffer, or a combination of buffering and acid or base addition. The pH of the reaction mixture can be controlled before and/or during the course of the reaction. In some embodiments, the suitable reaction conditions comprise a solution pH from about 4 to about 10, pH from about 4 to about 6, pH from about 5 to about 6, pH from about 6 to about 9, pH from about 5 to about 7. In some embodiments, the reaction conditions comprise a solution pH of about 4, 4.5, 5, 5.5, 6, 6.5, 7, 7.5, 8, 8.5, 9, 9.5, or 10.

[0238] In the embodiments of the processes herein, a suitable temperature is used for the reaction conditions, for example, taking into consideration the increase in reaction rate at higher temperatures, and the activity of the enzyme during the reaction time period. Accordingly, in some embodiments, the suitable reaction conditions comprise a temperature of about 10° C. to about 60° C., about 10° C. to about 55° C., about 15° C. to about 60° C., about 20° C. to about 60° C., about 20° C. to about 55° C., about 25° C. to about 55° C., or about 30° C. to about 50° C. In some embodiments, the suitable reaction conditions comprise a temperature of about 10° C., 15° C., 20° C., 22° C., 25° C., 30° C., 35° C., 40° C., 45° C., 50° C., 55° C., or 60° C. In some embodiments, the temperature during the enzymatic reaction can be maintained at a specific temperature throughout the course of the reaction. In some embodiments, the temperature during the enzymatic reaction can be adjusted over a temperature profile during the course of the reaction.

[0239] In some embodiments, the processes of the invention are carried out in a solvent. Suitable solvents include water, aqueous buffer solutions, organic solvents, polymeric solvents, and/or co-solvent systems, which generally comprise aqueous solvents, organic solvents and/or polymeric solvents. The aqueous solvent (water or aqueous co-solvent system) may be pH-buffered or unbuffered. In some embodiments, the processes using the engineered nitroaldolase polypeptides can be carried out in an aqueous co-solvent system comprising an organic solvent (e.g., ethanol, isopropanol (IPA), dimethyl sulfoxide (DMSO), dimethylformamide (DMF) ethyl acetate, butyl acetate, 1-octanol, heptane, octane, methyl tert-butyl ether (MTBE), toluene, and the like), ionic or polar solvents (e.g., 1-ethyl-4-methylimidazolium tetrafluoroborate, 1-butyl-3-methylimidazolium tetrafluoroborate, 1-butyl-3-methylimidazolium hexafluorophosphate, glycerol, polyethylene glycol, and the like). In some embodiments, the co-solvent can be a polar solvent, such as a polyol, dimethylsulfoxide (DMSO), or lower alcohol. The non-aqueous co-solvent component of an aqueous co-solvent system may be miscible with the aqueous component, providing a single liquid phase, or may be partly miscible or immiscible with the aqueous component, providing two liquid phases. Exemplary aqueous co-solvent systems can comprise water and one or more co-solvents selected from an organic solvent, polar solvent, and polyol solvent. In general, the co-solvent component of an aqueous co-solvent system is chosen such that it does not adversely inactivate the nitroaldolase enzyme under the reaction conditions. Appropriate co-solvent systems can be readily identified by measuring the enzymatic activity of the specified engineered nitroaldolase enzyme with a defined substrate of interest in the candidate solvent system, utilizing an enzyme activity assay, such as those described herein.

[0240] In some embodiments of the process, the suitable reaction conditions comprise an aqueous co-solvent, where the co-solvent comprises DMSO at about 1% to about 50% (v/v), about 1 to about 40% (v/v), about 2% to about 40% (v/v), about 5% to about 30% (v/v), about 10% to about 30% (v/v), or about 10% to about 20% (v/v). In some embodiments of the process, the suitable reaction conditions can comprise an aqueous co-solvent comprising ethanol at about 1% (v/v), about 5% (v/v), about 10% (v/v), about 15% (v/v), about 20% (v/v), about 25% (v/v), about 30% (v/v), about 35% (v/v), about 40% (v/v), about 45% (v/v), or about 50% (v/v).

[0241] In some embodiments, the reaction conditions comprise a surfactant for stabilizing or enhancing the reaction. Surfactants can comprise non-ionic, cationic, anionic and/or amphiphilic surfactants. Exemplary surfactants, include by way of example and not limitation, nonyl phenoxypolyethoxylethanol (NP40), TRITON™ X-100 polyethylene glycol tert-octylphenyl ether, polyoxyethylene-stearylamine, cetyltrimethylammonium bromide, sodium oleylamidosulfate, polyoxyethylene-sorbitanmonostearate, hexadecyldimethylamine, etc. Any surfactant that may stabilize or enhance the reaction may be employed. The concentration of the surfactant to be employed in the reaction may be generally from 0.1 to 50 mg/ml, particularly from 1 to 20 mg/ml.

[0242] In some embodiments, the reaction conditions include an antifoam agent, which aids in reducing or preventing formation of foam in the reaction solution, such as when the reaction solutions are mixed or sparged. Anti-foam agents include non-polar oils (e.g., minerals, silicones, etc.), polar oils (e.g., fatty acids, alkyl amines, alkyl amides, alkyl sulfates, etc.), and hydrophobic (e.g., treated silica, polypropylene, etc.), some of which also function as surfactants. Exemplary anti-foam agents include, Y-30® (Dow Corning), poly-glycol copolymers, oxy/ethoxylated alcohols, and polydimethylsiloxanes. In some embodiments, the anti-foam can be present at about 0.001% (v/v) to about 5% (v/v), about 0.01% (v/v) to about 5% (v/v), about 0.1% (v/v) to about 5% (v/v), or about 0.1% (v/v) to about 2% (v/v). In some embodiments, the anti-foam agent can be present at about 0.001% (v/v), about 0.01% (v/v), about 0.1% (v/v), about 0.5% (v/v), about 1% (v/v), about 2% (v/v), about 3% (v/v), about 4% (v/v), or about 5% (v/v) or more as desirable to promote the reaction.

[0243] The quantities of reactants used in the nitroaldolase reaction will generally vary depending on the quantities of product desired, and concomitantly the amount of nitroaldolase substrate employed. Those having ordinary skill in the art will readily understand how to vary these quantities to tailor them to the desired level of productivity and scale of production.

[0244] In some embodiments, the order of addition of reactants is not critical. The reactants may be added together at the same time to a solvent (e.g., monophasic solvent, biphasic aqueous co-solvent system, and the like), or alternatively, some of the reactants may be added separately, and some together at different time points. For example, the cofactor, co-substrate and substrate may be added first to the solvent.

[0245] The solid reactants (e.g., enzyme, salts, etc.) may be provided to the reaction in a variety of different forms, including powder (e.g., lyophilized, spray dried, and the like), solution, emulsion, suspension, and the like. The reactants can be readily lyophilized or spray dried using methods and equipment that are known to those having ordinary skill in the art. For example, the protein solution can be frozen at −80° C. in small aliquots, then added to a pre-chilled lyophilization chamber, followed by the application of a vacuum.

[0246] For improved mixing efficiency when an aqueous co-solvent system is used, the nitroaldolase and co-substrate may be added and mixed into the aqueous phase first. The nitroaldolase substrate may be added and mixed in, followed by the organic phase or the substrate may be dissolved in the organic phase and mixed in. Alternatively, the nitroaldolase substrate may be premixed in the organic phase, prior to addition to the aqueous phase.

[0247] The processes of the present invention are generally allowed to proceed until further conversion of substrate to product does not change significantly with reaction time (e.g., less than 10% of substrate being converted, or less than 5% of substrate being converted). In some embodiments, the reaction is allowed to proceed until there is complete or near complete conversion of substrate to product. Transformation of substrate to product can be monitored using known methods by detecting substrate and/or product, with or without derivatization. Suitable analytical methods include gas chromatography, HPLC, MS, and the like.

[0248] In some embodiments of the process, the suitable reaction conditions comprise a substrate loading for each of one or more substrates of at least about 5 g/L, 10 g/L, 20 g/L, 30 g/L, 40 g/L, or more, and wherein the method results in at least about 10%, 20%, 30%, 40%, 50%, 60%, 70%, 80%, 90%, 95% or greater conversion of substrate compound to product compound in about in about 24 h or less, in about 12 h or less, in about 6 h or less, or in about 4 h or less.

[0249] The engineered nitroaldolase polypeptides of the present invention when used in the process under suitable reaction conditions result in an excess of the desired product in at least 30%, 40%, 50%, 60%, or greater enantiomeric excess over undesired product(s).

[0250] In some further embodiments of the processes for converting one or more substrate compounds to product compound using the engineered nitroaldolase polypeptides, the suitable reaction conditions can comprise an initial substrate loading for each of one or more substrates to the reaction solution which is then contacted by the polypeptide. This reaction solution is then further supplemented with additional substrate compound as a continuous or batchwise addition over time at a rate of at least about 1 g/L/h, at least about 2 g/L/h, at least about 4 g/L/h, at least about 6 g/L/h, or higher for each of one or more substrate compounds. Thus, according to these suitable reaction conditions, polypeptide is added to a solution having an initial substrate loading of at least about 1 g/L, 5 g/L, or 10 g/L for each of one or more substrate compounds. This addition of polypeptide is then followed by continuous addition of further substrate to the solution at a rate of about 2 g/L/h, 4 g/L/h, or 6 g/L/h for each of one or more substrate compounds until a much higher final substrate loading of at least about 30 g/L or more for each of one or more substrate compounds, is reached. Accordingly, in some embodiments of the process, the suitable reaction conditions comprise addition of the polypeptide to a solution having an initial substrate loading of at least about 1 g/L, 5 g/L, or 10 g/L followed by addition of further substrate to the solution at a rate of about 2 g/L/h, 4 g/L/h, or 6 g/L/h until a final substrate loading of at least about 30 g/L, or more, is reached for each of one or more substrate compounds. This substrate supplementation reaction condition allows for higher substrate loadings to be achieved while maintaining high rates of conversion of substrate to product of at least about 5%, 25%, 50%, 75%, 90% or greater conversion of substrate for either or both of one or more substrate compounds.

[0251] Any of the processes disclosed herein using the engineered polypeptides for the preparation of compound (3) can be carried out under a range of suitable reaction conditions, including but not limited to ranges of ketone substrates, ranges of nitroalkane substrates, temperature, pH, solvent system, substrate loading, polypeptide loading, and reaction time. In one example, in some embodiments, the preparation of compound (3) can be carried out wherein the suitable reaction conditions comprise: (a) ketone substrate loading of about 0.01 M to 1 M of substrate compound; (b) amino acid substrate loading of about 0.01 M to 1 M of substrate compound; (c) of about 0.5 g/L to 100 g/L of engineered polypeptide; (d) 0.01 M-1 M sodium citrate buffer; (e) pH at 5-8; and (f) temperature of about 15° C. to 60° C. In some embodiments, the suitable reaction conditions comprise: (a) about 0.5 M of compound (1) substrate compound); (b) about 0.3 M of compound (2) substrate compound); (c) about 50 g/L of each engineered polypeptide; (d) 0.1 M sodium citrate buffer; (e) static pH at 6, and (g) about 22° C.

[0252] In some embodiments, additional reaction components or additional techniques carried out to supplement the reaction conditions. These can include taking measures to stabilize or prevent inactivation of the enzyme, reduce product inhibition, shift reaction equilibrium to formation of the desired product.

[0253] In further embodiments, any of the above described process for the conversion of one or more substrate compounds to product compound can further comprise one or more steps selected from: extraction; isolation; purification; and crystallization of product compound. Methods, techniques, and protocols for extracting, isolating, purifying, and/or crystallizing the product from biocatalytic reaction mixtures produced by the above disclosed processes are known to the ordinary artisan and/or accessed through routine experimentation. Additionally, illustrative methods are provided in the Examples below.

[0254] Various features and embodiments of the invention are illustrated in the following representative examples, which are intended to be illustrative, and not limiting.

### Experimental

[0255] The following Examples, including experiments and results achieved, are provided for illustrative purposes only and are not to be construed as limiting the present invention.

[0256] In the Examples below, the following abbreviations apply: ppm (parts per million); M (molar); mM (millimolar), uM and μM (micromolar); nM (nanomolar); mol (moles); gm and g (gram); mg (milligrams); ug and μg (micrograms); L and l (liter); ml and mL (milliliter); cm (centimeters); mm (millimeters); um and μm (micrometers); sec. (seconds); min(s) (minute(s)); h(s) and hr(s) (hour(s)); U (units); MW (molecular weight); rpm (rotations per minute); psi and PSI (pounds per square inch); ° C. (degrees Centigrade); RT and rt (room temperature); CAM and cam (chloramphenicol); DMSO (dimethylsulfoxide); PMBS (polymyxin B sulfate); IPTG (isopropyl β-D-1-thiogalactopyranoside); LB (Luria-Bertani broth); TB (Terrific Broth; 12 g/L bacto-tryptone, 24 g/L yeast extract, 4 mL/L glycerol, 65 mM potassium phosphate, pH 7.0, 1 mM MgSO₄); PLP (pyridoxal 5′-phosphate), TEoA (triethanolamine buffer), HEPES (HEPES zwitterionic buffer; 4-(2-hydroxyethyl)-piperazineethanesulfonic acid); SFP (shake flask powder); CDS (coding sequence); DNA (deoxyribonucleic acid); RNA (ribonucleic acid); E. coli W3110 (commonly used laboratory E. coli strain, available from the Coli Genetic Stock Center [CGSC], New Haven, CT); HTP (high throughput); HPLC (high pressure liquid chromatography); GC (gas chromatography); FIOPC (fold improvements over positive control); Microfluidics (Microfluidics, Corp., Westwood, MA); Sigma-Aldrich (Sigma-Aldrich, St. Louis, MO; Difco (Difco Laboratories, BD Diagnostic Systems, Detroit, MI); Agilent (Agilent Technologies, Inc., Santa Clara, CA); Corning (Corning, Inc., Palo Alto, CA); Dow Corning (Dow Corning, Corp., Midland, MI); and Gene Oracle (Gene Oracle, Inc., Mountain View, CA).

### Example 1

### Production of Engineered Polypeptides in pCK110900

[0257] The polynucleotide (SEQ ID NO: 1) encoding the polypeptide having nitroaldolase activity (SEQ ID NO: 2), was cloned into the pCK110900 vector system (See e.g., U.S. Pat. No. 9,714,437, which is hereby incorporated by reference in its entirety) and subsequently expressed in E. coli W3110fhuA under the control of the lac promoter. This polynucleotide, and associated polypeptide, was derived from an oxynitrilase found in Baliospermum montanum.

[0258] In a 96-well format, single colonies were picked and grown in 190 μL LB media containing 1% glucose and 30 μg/mL CAM, at 30° C., 200 rpm with 85% humidity. Following overnight growth, 20 μL of the grown cultures were transferred into a deep-well plate containing 380 μL of TB media with 30 μg/mL CAM. The cultures were grown at 30° C., 250 rpm with 85% humidity for approximately 2.5 hours. When the optical density (OD₆₀₀) of the cultures reached 0.4-0.6, expression of the nitroaldolase gene was induced by the addition of IPTG to a final concentration of 1 mM. Following induction, growth continued for 18-20 hours at 30° C., 250 rpm with 85% humidity. Cells were harvested by centrifugation at 4,000 rpm and 4° C. for 10 minutes; the supernatant was then discarded. The cell pellets were stored at −80° C. until ready for use.

[0259] Prior to performing the assay, the cell pellets were thawed and resuspended in 200 μL of lysis buffer containing 1 g/L lysozyme, 0.5 g/L PMBS and 0.025 μL/mL of commercial DNAse (New England BioLabs, M0303L) in 0.1 M sodium citrate buffer at pH 6. The plates were agitated with medium-speed shaking for 2 hours on a microtiter plate shaker at room temperature. The plates were then centrifuged at 4,000 rpm for 15 minutes at 4° C., and the clarified supernatants were used in the HTP assay reaction described in the following examples.

[0260] Shake-flask procedures can be used to generate engineered nitroaldolase or polypeptide shake-flask powders (SFP), which are useful for secondary screening assays and/or use in the biocatalytic processes described herein. Shake flask powder preparation of enzymes provides a more purified preparation (e.g., up to 30% of total protein) of the engineered enzyme, as compared to the cell lysate used in HTP assays and also allows for the use of more concentrated enzyme solutions. To start the culture, a single colony of E. coli containing a plasmid encoding an engineered polypeptide of interest was inoculated into 5 mL of LB cell culture media with 30 μg/mL CAM and 1% glucose. The culture was grown overnight (at least 16 hours) in an incubator at 37° C., with shaking at 250 rpm. The grown culture was then added to 250 mL of TB media with 30 μg/mL CAM, in a 1 L shake-flask. The 250 mL culture was grown at 30° C. and 250 rpm, for 3.5 hours until OD₆₀₀ reached 0.6-0.8. Expression of the nitroaldolase gene was induced by the addition of IPTG to a final concentration of 1 mM, and growth was continued for an additional 18-20 hours. Cells were harvested by transferring the culture into a pre-weighed centrifuge bottle which was then centrifuged at 4,000 rpm for 20 minutes at 4° C. The supernatant was discarded, and the remaining cell pellet was weighed. In some embodiments, the cell pellet was stored at −80° C. until ready to use. For lysis, the cell pellet was resuspended in 6 mL/g wet cell weight of 25 mM triethanolamine-HCl buffer at pH 7 or 25 mM sodium citrate buffer at pH 6 and lysed using a 110L MICROFLUIDIZER® processor system (Microfluidics). Cell debris was removed by centrifugation at 10,000 rpm for 60 minutes at 4° C. The clarified lysate was collected, frozen at −80° C., and then lyophilized, using standard methods known in the art. Lyophilization of frozen clarified lysate provides a dry shake-flask powder comprising crude engineered polypeptide.

### Example 2

### Evolution and Screening of Engineered Polypeptides Derived from SEQ ID NO: 2 for Improved Production of Compound (3)

[0261] The engineered polynucleotide (SEQ ID NO: 1) encoding the polypeptide with nitroaldolase activity of SEQ ID NO: 2 was used to generate the engineered polypeptides of Table 2-1. These polypeptides displayed improved nitroaldolase activity under the desired conditions e.g., the improvement in the formation of the β-nitro alcohol, compound (3), from the substrates trifluoroacetone and nitromethane, compounds (1) and (2), respectively, as compared to the starting polypeptide. Similarly, the engineered polypeptides of Table 2-2 displayed improved nitroaldolase selectivity towards the desired (S)-alcohol. The engineered polypeptides, having the amino acid sequences of even-numbered sequence identifiers were generated from the “backbone” amino acid sequence of SEQ ID NO: 2, as described below.

[0262] Directed evolution began with the polynucleotide set forth in SEQ ID NO: 1. Libraries of engineered polypeptides were generated using various well-known techniques (e.g., saturation mutagenesis, recombination of previously identified beneficial amino acid differences) and screened using HTP assay and analysis methods that measured the polypeptide's ability to produce compound (3).

[0263] The enzyme assays were carried out in 96-well deep-well (1.1 mL total volume) plates, in 100 μL total reaction volume per well. The reactions contained 67 v/v % of undiluted nitroaldolase lysate, prepared as described in EXAMPLE 1, 40 mM trifluoroacetone (1), and 500 mM nitromethane (2) dissolved in 100 mM sodium citrate at pH 6. The reaction plates were heat-sealed and shaken at 250 rpm at 22° C. for ˜22 hours.

[0264] After overnight incubation (˜22 hours), 300 μL/well of methyl tert-butyl ether (MTBE) was added to the reaction plates and mixed well. The plates were sealed and centrifuged at 4,000 rpm for 10 min. An aliquot of the upper organic phase was removed and added to shallow 96 well plates for analysis by gas chromatography (GC) as described in EXAMPLE 8.

[0265] Hit variants were grown in 250 mL shake flasks as described in EXAMPLE 1 to generate lyophilized enzyme powders. The activity of the enzyme powders were evaluated by measuring the enzyme dose response at 0-25 g/L of the nitroaldolase shake flask powder under assay conditions, as described in this EXAMPLE. These hit variants are denoted with a * in Tables 2-1 and 2-2.

TABLE 2-1
Nitroaldolase Activity for the Production
of Compound (3) Relative to SEQ ID NO: 2

| | | Fold |
|---|---|---|
| | | Improvement |
| SEQ | | in Activity |
| ID NO: | Amino Acid Differences | Relative to |
| (nt/aa) | (Relative to SEQ ID NO: 2) | SEQ ID NO: 2 |
| 3/4* | I68L/V97I/K175P/I197V/K223P | +++ |
| 5/6* | A33V/K72E/V97I/I197V | +++ |
| 7/8 | I9V/A33V/V97I/V230I | +++ |
| 9/10* | H103S | +++ |
| 11/12 | L18C/V97I/K223P/I237P/I239F | +++ |
| 13/14 | K72E/K175P/I197V | +++ |
| 15/16 | I68L/K72E/V97I | +++ |
| 17/18 | I68L/K72E/V97I/I197V | +++ |
| 19/20 | I9V/I68L/K72E | +++ |
| 21/22 | C13G | +++ |
| 23/24* | T11S | +++ |
| 25/26 | L18C/K72E/V97I/K175P/I237P/I239F | +++ |
| 27/28 | I7V/K72E/V97I/K175P/V230I | +++ |
| 29/30 | A33V/K72E/K175P | +++ |
| 31/32 | I7V/I68L/K72E/K175P | +++ |
| 33/34 | I7V/I9V/I68L/K72E/I197V | +++ |
| 35/36 | L18C/A33V/K72E/V97I/K175P/V202I | +++ |
| 37/38 | A33V/I68L/K72E | ++ |
| 39/40 | L18C/A33V/K72E/K175P/V202I/I237P/I239F | ++ |
| 41/42 | I9V/V202I | ++ |
| 43/44 | I7V/I9V/K175P | ++ |
| 45/46 | I9V/K175P | ++ |
| 47/48 | L18C/K72E/K175P/I197V | ++ |
| 49/50 | L18C/I68L/K72E/K175P/V202I/I239F | ++ |
| 51/52 | I9V/A33V/K72E/V230I | ++ |
| 53/54 | I9V | ++ |
| 55/56 | A33V/I68L/K72E/K175P/V230I | ++ |
| 57/58 | H103M | ++ |
| 59/60 | L18C/A33V/K72E/V97I/F158Y/I239F | ++ |
| 61/62 | L18C/A33V/K72E/I197V/I237P | ++ |
| 63/64 | I7V/I9V/A33V/K72E/K175P/I197V/V230I | ++ |
| 65/66 | L18C/I68L/K72E/F158Y/K175P/I237P/I239F | ++ |
| 67/68 | I68L/K72E/I197V | ++ |
| 69/70 | L18C/A33V/I68L/V97I/F158Y/K175P/I239F | ++ |
| 71/72 | I68L/K72E | ++ |
| 73/74 | I7V/I9V | ++ |
| 75/76 | I7V/I9V/A33V/K72E/V230I | ++ |
| 77/78 | L18I | ++ |
| 79/80 | L18C/K72E/I239F | ++ |
| 81/82 | I68L/V97I/K175P | ++ |
| 83/84 | V97I/K175P | ++ |
| 85/86 | I7V/I9V/I197V | ++ |
| 87/88 | I9V/A33V/I68L/F158Y/I197V | ++ |
| 89/90 | L18C/I68L/K175P/K223P/I237P/I239F | + |
| 91/92 | L18C/I68L/K72E/I239F | + |
| 93/94 | V39A | + |
| 95/96 | I9V/T11G/A33V/K72E/I197V/V230I | + |
| 97/98 | L18C/A33V/K72E/V97I/F158Y/K175P | + |
| 99/100 | V97I/F158Y/K175P/I197V | + |
| 101/102 | I7V/K72E | + |
| 103/104 | I7V/I9V/A33V/I68L/K72E/F158Y | + |
| 105/106 | L18C/I197V/I239F | + |
| 107/108 | L18C/I68L/K72E | + |
| 109/110 | I9V/V97I/K175P/V202I/Q218M | + |
| 111/112 | A33V/K175P | + |
| 113/114 | I68L/K72E/I197V/I239F | + |
| 115/116 | A33V/K72E | + |
| 117/118 | L18C/K72E/I237P | + |
| 119/120 | S122C | + |
| 121/122 | V124Y | + |
| 123/124 | A33V/I68L/K223P/I239F | + |
| 125/126 | I197V/V202I | + |
| 127/128 | I197V | + |
| 129/130 | K72E/V97I/F158Y/K223P/I237P | + |
| 131/132 | V124E | + |
| 133/134 | L18C/I68L/I239F | + |
| 135/136 | V124T | + |
| 137/138 | S122Q | + |
| 139/140 | H14Y/A33V/I68L/K72E/V97I | + |
| 141/142 | K175P | + |
| 143/144 | L18C/I239F | + |
| 145/146 | L18C/K175P | + |
| 147/148 | V39G | + |
| 149/150 | W128Y | + |
| 151/152 | L18C/V97I/K175P/I237P/I239F | + |
| 153/154 | I7V/I9V/F158Y/K175P | + |
| 155/156 | I7V/A33V | + |
| 157/158 | F121Y | + |
| 159/160 | L148M | + |
| 161/162 | D44N/V97I | + |
| 163/164 | V124C | + |
| 165/166 | F125R | + |
| 167/168 | W128H | + |
| 169/170 | G52S | + |
| 171/172 | Y20H/V124C | + |
| 173/174 | F133C | + |
| 175/176 | F133A | + |

Levels of increased activity were determined relative to the reference polypeptide of SEQ ID NO: 2 and defined as follows:
“+” 1.14 to 1.62,
“++” >1.62,
“+++” >1.99

TABLE 2-2
Nitroaldolase Selectivity for the Production
of Compound (3) Relative to SEQ ID NO: 2

| SEQ | | Improvement in |
|---|---|---|
| ID NO: | Amino Acid Differences | Selectivity Relative |
| (nt/aa) | (Relative to SEQ ID NO: 2) | to SEQ ID NO: 2 |
| 177/178* | I7V/T11G/K72E | +++ |
| 179/180 | I9V/T11G/A33V/K72E | +++ |
| 181/182 | I7V/T11G/A33V/K72E/V97I | +++ |
| 183/184 | I9V/T11G/K72E | +++ |
| 185/186 | I7V/T11G/I237P | +++ |
| 187/188 | I7V/T11G/A33V/V97I | +++ |
| 189/190 | I9V/T11G/A33V | +++ |
| 191/192 | M107G | +++ |
| 193/194 | F158R | +++ |
| 195/196 | I7V/T11G/F158Y | +++ |
| 197/198 | I86W | +++ |
| 199/200 | Q218T | +++ |
| 201/202* | F158I | +++ |
| 203/204 | I12K | +++ |
| 205/206 | R174G | +++ |
| 207/208 | G204R | +++ |
| 209/210 | V39W | +++ |
| 211/212 | S134D | +++ |
| 213/214 | S122T | +++ |
| 215/216 | A40L | +++ |
| 217/218 | I237W | +++ |
| 219/220 | V146D | +++ |
| 221/222 | A105D | +++ |
| 223/224 | C13L | +++ |
| 225/226 | D130V | +++ |
| 227/228 | G82T | +++ |
| 229/230 | G204V | +++ |
| 231/232 | V117L | +++ |
| 233/234 | M107W | +++ |
| 235/236 | K236L | ++ |
| 237/238 | L183K | ++ |
| 239/240 | K120L | ++ |
| 241/242 | K119N/K120F | ++ |
| 243/244 | H14R | ++ |
| 245/246 | H10R | ++ |
| 247/248 | K236G | ++ |
| 249/250 | G204E | ++ |
| 251/252 | W54Y | ++ |
| 253/254 | T11R | ++ |
| 255/256 | Y203Q | ++ |
| 257/258 | I237S | ++ |
| 259/260 | I68L/K175P/I239F | ++ |
| 261/262 | N104G | ++ |
| 263/264 | A169I | ++ |
| 265/266 | E123P | ++ |
| 267/268 | D130M | ++ |
| 269/270 | N85Q | ++ |
| 271/272 | H103P | ++ |
| 273/274 | W54N/T126I | ++ |
| 275/276 | N85M | ++ |
| 277/278 | A115K | ++ |
| 279/280 | N85L | ++ |
| 281/282 | Q215L | ++ |
| 283/284 | A115V | ++ |
| 285/286 | A115L | ++ |
| 287/288 | T152P | ++ |
| 289/290 | Y57N | ++ |
| 291/292 | H10G | ++ |
| 293/294 | S131L | ++ |
| 295/296 | F210V | ++ |
| 297/298 | R174C | ++ |
| 299/300 | G149W | ++ |
| 301/302 | L18T | ++ |
| 303/304 | K120C | ++ |
| 305/306 | K119L | ++ |
| 307/308 | S159L | ++ |
| 309/310 | A40V | ++ |
| 23/24* | T11S | ++ |
| 311/312 | Q208V | ++ |
| 313/314 | N85A | ++ |
| 315/316 | S159H | ++ |
| 317/318 | E180G | ++ |
| 319/320 | F158L | + |
| 321/322 | I7V/A33V/K72E/V97I/F158Y/ | + |
| | K175P/I197V/I237P/I239F | |
| 323/324 | A33V/I68L/K72E/V97I/I237P/I239F | + |
| 325/326 | F158W | + |
| 327/328 | I9V/A33V/I68L/V97I/I237P/I239F | + |
| 329/330 | I51Q | + |
| 331/332 | I237L | + |
| 333/334 | V146N | + |
| 335/336 | A145P | + |
| 337/338 | S159G | + |
| 339/340 | N104A | + |
| 341/342 | Q208C | + |
| 343/344 | V117C | + |
| 345/346 | Q208G | + |
| 347/348 | Q208T | + |
| 349/350 | A115C | + |
| 351/352 | L148P | + |
| 353/354 | A40T | + |
| 355/356 | S134W | + |
| 357/358 | T137I/A145V | + |
| 359/360 | H10P | + |
| 361/362 | I51A | + |
| 363/364 | L18S | + |
| 365/366 | I51S | + |
| 367/368 | A169G | + |
| 369/370 | E49R | + |
| 371/372 | V173Y | + |
| 373/374 | L48W | + |
| 375/376 | Q208A | + |
| 377/378 | F158M | + |
| 379/380 | D150I | + |
| 381/382 | Q208L | + |
| 383/384 | I209C | + |
| 385/386 | A169S | + |
| 387/388 | D150L | + |
| 389/390 | K120Y | + |
| 391/392 | I9V/K72E/V97I/F158Y/I237P/I239F | + |
| 393/394 | S134L | + |
| 395/396 | V124P | + |
| 397/398 | K175D | + |
| 399/400 | F133W | + |
| 401/402 | V146G | + |
| 403/404 | T144L | + |
| 405/406 | S41C | + |
| 407/408 | A145F | + |
| 409/410 | F158Y | + |
| 411/412 | I9V/Q218M/I239F | + |
| 413/414 | A33V/K72E/F158Y/I239F | + |
| 415/416 | Q208E | + |
| 417/418 | Q181C | + |
| 419/420 | S122G | + |
| 421/422 | D150V | + |
| 423/424 | D127L | + |
| 425/426 | I51T | + |
| 427/428 | E49Q | + |
| 429/430 | I84L | + |
| 431/432 | S134V | + |
| 433/434 | E180V | + |
| 435/436 | E123A | + |
| 437/438 | V173E | + |
| 439/440 | E147R | + |
| 441/442 | D127M | + |
| 443/444 | V39R | + |
| 445/446 | S134F | + |
| 447/448 | L148V | + |
| 449/450 | A145L | + |
| 451/452 | E123T | + |
| 453/454 | D127A | + |
| 455/456 | N104S | + |
| 457/458 | I157V | + |
| 459/460 | A40S | + |
| 461/462 | S134R | + |

Levels of increased selectivity (fraction of product that is the (S)-alcohol) were determined relative to the reference polypeptide of SEQ ID NO: 2 and defined as follows:
“+” 0.40 to 0.47,
“++” >0.47,
“+++” >0.52

### Example 3

### Evolution and Screening of Engineered Polypeptides Derived from SEQ ID NO: 24 for Improved Production of Compound (3)

[0266] The engineered polynucleotide (SEQ ID NO: 23) encoding the polypeptide with nitroaldolase activity of SEQ ID NO: 24 was used to generate the engineered polypeptides of Table 3-1. These polypeptides displayed improved nitroaldolase activity under the desired conditions e.g., the improvement in the formation of the β-nitro alcohol, compound (3), from the substrates trifluoroacetone and nitromethane, compounds (1) and (2), respectively, as compared to the starting polypeptide. Similarly, the engineered polypeptides of Table 3-2 displayed improved nitroaldolase selectivity towards the desired (S)-alcohol. The engineered polypeptides, having the amino acid sequences of even-numbered sequence identifiers were generated from the “backbone” amino acid sequence of SEQ ID NO: 24, as described below.

[0267] Directed evolution began with the polynucleotide set forth in SEQ ID NO: 23. Libraries of engineered polypeptides were generated using various well-known techniques (e.g., saturation mutagenesis, recombination of previously identified beneficial amino acid differences) and screened using HTP assay and analysis methods that measured the polypeptide's ability to produce compound (3).

[0268] The enzyme assay and analysis were carried using a similar method as described in EXAMPLE 2. The high throughput cell pellets were lysed in 400 μL/well of lysis buffer and the reaction was carried out with 93 v/v % clarified lysate, 0.3 M trifluoroacetone (1) and 0.5 M nitromethane (2).

[0269] Hit variants were grown in 250 mL shake flasks, and enzyme powders were generated as described in EXAMPLE 1. The activity of the enzyme powders was evaluated at 0-100 g/L of the nitroaldolase SFP, 0.3 M trifluoroacetone (1), 0.5 M nitromethane (2), 0.1 M sodium citrate, pH 6, 22° C., for 22 hours, using similar assay as described in EXAMPLE 2. These hit variants are denoted with a * in Tables 3-1 and 3-2.

TABLE 3-1
Nitroaldolase Activity for the Production
of Compound (3) Relative to SEQ ID NO: 24

| | | Fold |
|---|---|---|
| | | Improvement |
| SEQ | | in Activity |
| ID NO: | Amino Acid Differences | Relative to |
| (nt/aa) | (Relative to SEQ ID NO: 24) | SEQ ID NO: 24 |
| 463/464* | A33V/V39W/Y118L/F121Y/K175P | +++ |
| 465/466 | A33V/V39W/I197V/F210M | +++ |
| 467/468* | Q238M | +++ |
| 469/470 | G81F | +++ |
| 471/472 | A33V/V39W/D44N/I197V | +++ |
| 473/474 | V39W/H103S | +++ |
| 475/476 | H103V | +++ |
| 477/478 | S232G | +++ |
| 479/480 | V39W/D44Y/H103S | +++ |
| 481/482 | A33V/Y118L/F121Y | +++ |
| 483/484* | A33V/V39W/F121Y/K175P | +++ |
| 485/486 | H103S | +++ |
| 487/488* | A33V/V39W/D44N/Y118L/F121Y | +++ |
| 489/490 | D44N/H103S | ++ |
| 491/492 | H103S/D150P | ++ |
| 493/494 | V39W/D44N/K175P/I197V/V230I | ++ |
| 495/496* | A33V/V39W/D44N/F121Y | ++ |
| 497/498 | A33V/V39W/F210M/V230I | ++ |
| 499/500 | Y118L/F121Y/I197V | ++ |
| 501/502 | I43M | ++ |
| 503/504 | H103L | ++ |
| 505/506 | T152F | ++ |
| 507/508 | V39W/H103S/F125P/D127G/V146L/ | ++ |
| | D150P | |
| 509/510 | I9V/V39W/S122T/I157V | ++ |
| 511/512 | Y118L/F121Y/K175P | ++ |
| 513/514 | A33V/V39W/D44N/T152F | ++ |
| 515/516* | I43S | ++ |
| 517/518 | H103Q | ++ |
| 519/520 | V39W/D44N/T152F/V230I | ++ |
| 521/522 | S159Q | ++ |
| 523/524 | A33V/V39W/F210M | ++ |
| 525/526 | A33V/V39W | ++ |
| 527/528 | H103M/F125P/V146L | ++ |
| 529/530 | V39W/H103S/D127G/D150P | + |
| 531/532 | Y118L/F121Y | + |
| 533/534 | A33V/V39W/D44N/F210M/V230I | + |
| 535/536 | L18I/A33V/K175P | + |
| 537/538 | I43R | + |
| 539/540 | I43T | + |
| 541/542 | F121Y | + |
| 543/544 | V39W | + |
| 545/546 | K175P | + |
| 547/548 | L18I/A33V/V39W/V230I | + |
| 549/550 | V39W/H103M/D150P | + |
| 551/552 | V39W/H103S/F125R | + |
| 553/554 | F210M | + |
| 555/556 | A33V/Y118L/F121W/K175P | + |
| 557/558 | H103M | + |
| 559/560 | L18I/K175P | + |
| 561/562 | I43Q | + |
| 563/564 | A33V/V39W/D44N/K175P | + |
| 565/566 | V39W/H103M/F125R/V146L | + |
| 567/568 | V39W/H103S/F125R/D127G/V146L | + |
| 569/570 | V39W/H103M | + |
| 571/572 | T152A/I197V | + |
| 573/574 | A154I | + |
| 575/576 | V39W/Y118L/F121Y | + |
| 577/578 | H103S/F125P/D127G | + |
| 579/580 | V39W/H103Q | + |
| 581/582 | L18I | + |
| 583/584 | V39W/I197V/F210M | + |
| 585/586 | V39W/I197V | + |
| 587/588 | L18I/V39W/D44N/Y118L | + |
| 589/590 | H103M/D127G | + |
| 591/592 | V39W/D44N/Y118L | + |
| 593/594 | Y20H | + |
| 595/596 | I163P | + |

Levels of increased activity were determined relative to the reference polypeptide of SEQ ID NO: 24 and defined as follows:
“+” 1.20 to 1.35,
“++” >1.35,
“+++” >1.55

TABLE 3-2
Nitroaldolase Selectivity for the Production
of Compound (3) Relative to SEQ ID NO: 24

| | | Improvement |
|---|---|---|
| | | in Selectivity |
| SEQ | | Relative to |
| ID NO: | Amino Acid Differences | SEQ ID |
| (nt/aa) | (Relative to SEQ ID NO: 24) | NO: 24 |
| 597/598 | A33V/F121W | +++ |
| 495/496* | A33V/V39W/D44N/F121Y | +++ |
| 599/600 | F121W | +++ |
| 601/602 | Y118L/F121W | +++ |
| 603/604 | A33V/Y118L/F121W/I197V | +++ |
| 605/606 | A33V/Y118L/F121W/K175P | +++ |
| 607/608 | A33V/F121Y/V230I | +++ |
| 487/488* | A33V/V39W/D44N/Y118L/F121Y | +++ |
| 609/610 | A33V/V39W/D44N/F121Y/V230I | +++ |
| 611/612 | L18I/A33V/V39W/D44N/F121T | +++ |
| 613/614 | A33V/V39W/F121W | +++ |
| 541/542 | F121Y | +++ |
| 615/616 | V39W/F121W | +++ |
| 481/482 | A33V/Y118L/F121Y | +++ |
| 617/618 | A33V/V39W/Y118L/F121W/K175P | +++ |
| 483/484* | A33V/V39W/F121Y/K175P | +++ |
| 531/532 | Y118L/F121Y | +++ |
| 499/500 | Y118L/F121Y/I197V | +++ |
| 463/464* | A33V/V39W/Y118L/F121Y/K175P | +++ |
| 619/620* | I43E | +++ |
| 621/622 | F121Y/K175P/V230I | +++ |
| 623/624 | L172R | +++ |
| 511/512 | Y118L/F121Y/K175P | +++ |
| 625/626 | L18I/Y118L/F121W/F210M | +++ |
| 627/628 | I9V/C13G/V39W/K72E/S122T | +++ |
| 629/630 | L18I/V39W/D44N/Y118L/F121W/V230I | +++ |
| 631/632 | I43W | ++ |
| 575/576 | V39W/Y118L/F121Y | ++ |
| 633/634 | I9V/C13G | ++ |
| 635/636 | A33V/V39W/Y118L/F121Y/K175P/ | ++ |
| | V230I | |
| 637/638 | L18I/Y118L/F121Y/V230I | ++ |
| 639/640 | A33V/V39W/D44N/F121Y/K175P/ | ++ |
| | F210M | |
| 641/642 | I9V/C13G/I68L/V97I/I239F | ++ |
| 643/644 | I9V/C13G/K72E | ++ |
| 645/646 | I9V/C13G/S134D | ++ |
| 647/648 | F121Y/F210M | ++ |
| 649/650 | I9V/C13G/V39W/V97I/I239F | ++ |
| 651/652 | A33V/V39W/D44N/Y118L/F121W/ | ++ |
| | F210M/V230I | |
| 653/654 | L18I/A33V/V39W/F121T/K175P | ++ |
| 655/656 | L172Q | ++ |
| 657/658 | L18C/A33V/Y118L/F121W | ++ |
| 659/660 | Y20R | ++ |
| 661/662 | A33V/V39W/K73N/F121Y/I197V | ++ |
| 663/664 | L18I/Y118L/F121Y | ++ |
| 665/666 | V39W/D44N/Y118L/F121W/K175P/ | ++ |
| | F210M | |
| 667/668 | L172E | ++ |
| 669/670 | V39W/Y118L/F121W/F210M | ++ |
| 671/672 | L18I/F121Y/F210M | ++ |
| 673/674 | C13G/V39W/K72E/V97I/S122T/ | ++ |
| | S134D/K223P | |
| 675/676 | L18C/Y118L/F121W | ++ |
| 677/678 | I9V/C13G/V39W | ++ |
| 679/680 | L18I/F121T/K175P | ++ |
| 681/682 | V39W/Y118L/F121Y/F210M | ++ |
| 561/562 | I43Q | ++ |
| 683/684 | Y20G | ++ |
| 685/686 | A33V/V39W/F121W/F210M/V230I | ++ |
| 687/688 | C13G/I68L | ++ |
| 689/690 | A33V/V39W/D44N/F121V | ++ |
| 691/692 | L18C/F121W | ++ |
| 693/694 | L18I/Y118L/F121W | ++ |
| 695/696 | C13G/V39W | ++ |
| 697/698 | I9V/C13G/I68L/K72E/V97I/I239F | ++ |
| 699/700 | C13G/I68L/K72E/V97I/S122T/I239F | ++ |
| 701/702 | L18C/F121Y | ++ |
| 703/704 | C13G/V39W/I68L/K72E/V97I | ++ |
| 705/706 | L18I/A33V/Y118L/F121W | ++ |
| 707/708 | L18C/F121W/F210M | ++ |
| 515/516* | I43S | + |
| 709/710 | L18C/A33V/Y118L/F121Y | + |
| 711/712 | L18C/F121Y/V230I | + |
| 713/714 | L18C/V39W/Y118L/F121W | + |
| 715/716 | V39W/F121W/F210M/V230I | + |
| 717/718 | C13G/V39W/V97I/I239F | + |
| 719/720 | L18C/A33V/F121Y | + |
| 721/722 | L18C/Y118L/F121Y | + |
| 723/724 | L18I/Y118L/F121W/K175P | + |
| 725/726 | L18I/F121W | + |
| 727/728 | L18C/A33V/F121Y/I197V | + |
| 729/730 | L18C/F121W/K175P | + |
| 731/732 | L18I/V39W/F121V/K175P | + |
| 733/734 | A33V/V39W/F121V | + |
| 735/736 | L18I/A33V/V39W/F121W | + |
| 737/738 | L18I/A33V/V39W/F121V/K175P/I197V | + |
| 739/740 | L18C/A33V/V39W/F121W/F210M | + |
| 741/742 | Y20T | + |
| 743/744 | L18I/A33V/V39W/D44N/Y118L/F121W/ | + |
| | K175P/I197V/F210M | |
| 745/746 | I9V/C13G/V39W/I68L/K72E/I239F | + |
| 747/748 | L18C/A33V/V39W/F121Y/K175P | + |
| 749/750 | L18C/A33V/F121Y/F210M/V230I | + |
| 751/752 | A33V/V39G/D44N/F121W/T152A | + |
| 753/754 | C13G/V39W/I239F | + |
| 755/756 | I9V/C13G/I68L/V97I/S134D/I239F | + |
| 757/758 | I9V/C13G/V39W/I68L/I239F | + |
| 759/760 | C13G/V39W/I68L | + |
| 761/762 | D44V | + |
| 763/764 | L18C/V39W/F121W/I197V/F210M | + |
| 765/766 | L18C/A33V/V39W/H112R/Y118L/ | + |
| | F121W/I197V | |
| 767/768 | I12A/H103S | + |
| 769/770 | I12A/H103S/D150P | + |
| 771/772 | L172A | + |
| 773/774 | L18C/F121V/K175P | + |
| 775/776 | L18C/F121V | + |
| 777/778 | L18C/V39W/F121W/K175P/F210M | + |
| 779/780 | F121V | + |
| 781/782 | V39G/I68L/K72E/I239F | + |
| 783/784 | Y20K | + |
| 785/786 | C13F | + |
| 787/788 | L18C/A33V/V39W/F121W/K175P/F210M | + |
| 789/790 | L18I/V39W/D44N/F121V/K175P/F210M | + |
| 791/792 | L18I/V39W/Y118L/F121W/F210M | + |
| 793/794 | L148F | + |
| 795/796 | L172G | + |
| 797/798 | A16V | + |
| 799/800 | K21V | + |
| 801/802 | S159Q | + |
| 803/804 | L245G | + |
| 805/806 | D37L/E91G | + |
| 807/808 | L18C/V39W/D44N/F121Y/K175P/F210M | + |
| 809/810 | L18I/Y118L/F121T | + |
| 811/812 | E79F | + |
| 813/814 | L153W | + |
| 815/816 | I248S | + |
| 817/818 | A233R | + |
| 819/820 | S161M | + |
| 821/822 | S11N | + |
| 823/824 | L76P | + |
| 825/826 | V101L | + |
| 827/828 | I7E | + |
| 829/830 | L172V | + |
| 831/832 | I12A/G42W/F125R/D127G | + |
| 833/834 | A16M | + |
| 835/836 | D207N | + |
| 837/838 | L245D | + |
| 839/840 | V200G | + |
| 841/842 | I248G | + |

Levels of increased selectivity (fraction of product that is the (S)-alcohol) were determined relative to the reference polypeptide of SEQ ID NO: 24 and defined as follows:
“+” 0.50 to 0.52,
“++” >0.52,
“+++” >0.54

### Example 4

### Evolution and Screening of Engineered Polypeptides Derived from SEQ ID NO: 496 for Improved Production of Compound (3)

[0270] The engineered polynucleotide (SEQ ID NO: 495) encoding the polypeptide with nitroaldolase activity of SEQ ID NO: 496 was used to generate the engineered polypeptides of Table 4-1. These polypeptides displayed improved nitroaldolase activity under the desired conditions e.g., the improvement in the formation of the β-nitro alcohol, compound (3), from the substrates trifluoroacetone and nitromethane, compounds (1) and (2), respectively, as compared to the starting polypeptide. Similarly, the engineered polypeptides of Table 4-2 displayed improved nitroaldolase selectivity towards the desired (S)-alcohol. The engineered polypeptides, having the amino acid sequences of even-numbered sequence identifiers were generated from the “backbone” amino acid sequence of SEQ ID NO: 496, as described below.

[0271] Directed evolution began with the polynucleotide set forth in SEQ ID NO: 495. Libraries of engineered polypeptides were generated using various well-known techniques (e.g., saturation mutagenesis, recombination of previously identified beneficial amino acid differences) and screened using HTP assay and analysis methods that measured the polypeptide's ability to produce compound (3).

[0272] The enzyme assay and analysis were carried using the same method as described in EXAMPLE 3.

[0273] Hit variants were grown in 250 mL shake flasks, and enzyme powders were generated as described in EXAMPLE 1. The activity of the enzyme powders was evaluated as described in EXAMPLE 3. These hit variants are denoted with a * in Tables 4-1 and 4-2.

TABLE 4-1
Nitroaldolase Activity for the Production
of Compound (3) Relative to SEQ ID NO: 496

| | | Fold Improvement |
|---|---|---|
| SEQ | | in Activity |
| ID NO: | Amino Acid Differences | Relative to |
| (nt/aa) | (Relative to SEQ ID NO: 496) | SEQ ID NO: 496 |
| 843/844 | Q238M | +++ |
| 845/846 | H103S/S159Q/Q238M | +++ |
| 847/848 | H103S/Q238M | +++ |
| 849/850 | H103S/Y194L/Q238M | ++ |
| 851/852 | I43Q/Q238M | + |
| 853/854 | H103S | + |
| 855/856 | I43S/Q238M | + |
| 857/858 | Q238M/K241R | + |
| 859/860* | I43S/H103S/L172R/Q238M | + |
| 861/862 | I43Q/H103S/Q238M/K241R | + |
| 863/864* | I43E/H103S/Q238M/K241R | + |
| 865/866 | S232G | ++ |
| 867/868 | H103V | ++ |
| 869/870 | G81F/S232G | ++ |
| 871/872 | I43M/H103L | ++ |
| 873/874 | H103L | + |
| 875/876 | S122R | +++ |
| 877/878 | S122I | ++ |
| 879/880 | S122C | ++ |
| 881/882 | S122Q | ++ |
| 883/884 | S122M | + |
| 885/886 | S122T | + |
| 887/888 | S122V | + |
| 889/890 | S122K | + |
| 891/892 | S122L | + |

Levels of increased activity were determined relative to the reference polypeptide of SEQ ID NO: 496 and defined as follows:
“+” 1.14 to 1.26,
“++” >1.26,
“+++” >1.35

TABLE 4-2
Nitroaldolase Selectivity for the Production
of Compound (3) Relative to SEQ ID NO: 496

| | | Improvement |
|---|---|---|
| SEQ | | in Selectivity |
| ID NO: | Amino Acid Differences | Relative to |
| (nt/aa) | (Relative to SEQ ID NO: 496) | SEQ ID NO: 496 |
| 859/860* | I43S/H103S/L172R/Q238M | +++ |
| 893/894* | I43E/H103S/Q238M | +++ |
| 895/896 | H103S/Y121W/L172R/Q238M | +++ |
| 863/864* | I43E/H103S/Q238M/K241R | +++ |
| 897/898 | I43S/H103S/Q238M/K241R | +++ |
| 861/862 | I43Q/H103S/Q238M/K241R | +++ |
| 899/900 | I43E/H103S/Y121W/L172R/K241R | +++ |
| 901/902 | H103S/L172R/Q238M | +++ |
| 903/904 | N44V/H103S/Y121W/Q238M | +++ |
| 905/906 | N44V/H103S/Q238M/K241R | +++ |
| 851/852 | I43Q/Q238M | ++ |
| 855/856 | I43S/Q238M | ++ |
| 907/908 | N44V/H103S/Q238M | ++ |
| 909/910 | I43S/Y194L/Q238M | ++ |
| 845/846 | H103S/S159Q/Q238M | ++ |
| 911/912 | I43Q/Y121W | ++ |
| 847/848 | H103S/Q238M | ++ |
| 913/914 | I43S | + |
| 915/916 | N44V/Y121W/Q238M/K241R | + |
| 917/918 | H103S/Y194L/Q238M | + |
| 919/920 | H103S/Y121W | + |
| 853/854 | H103S | + |
| 921/922* | I43Q/H103L/L172R | +++ |
| 923/924* | I43Q/Q47G/H103S/S232G | ++ |
| 925/926* | I43S/H103S | ++ |
| 927/928 | I43S/H103L | ++ |
| 929/930 | I43Q/H103S | ++ |
| 931/932 | I43M/H103V | ++ |
| 933/934 | I43M/Q47G/H103V | ++ |
| 935/936 | H103V | ++ |
| 937/938 | I43M/H103S | + |
| 939/940 | I43M/Q47G/H103L | + |
| 871/872 | I43M/H103L | + |
| 941/942 | H103S | + |
| 943/944 | I43S/H103S/L172R | + |
| 945/946 | H103L | + |
| 947/948 | Q47G/H103L | + |
| 949/950* | S122R | ++ |
| 883/884 | S122M | ++ |
| 951/952 | S122I | + |
| 953/954 | S122L | + |
| 955/956 | S122H | + |
| 957/958 | S122V | + |
| 959/960 | S122T | + |
| 961/962 | S122K | + |
| 963/964 | I12V | + |
| 965/966 | S122N | + |
| 967/968* | E180L | + |
| 969/970 | E180V | + |
| 971/972 | N221G | + |
| 973/974 | S131Y | + |
| 975/976 | T63P | + |
| 977/978 | F178A | + |
| 979/980 | V146I | + |

Levels of increased selectivity (fraction of product that is the (S)-alcohol) were determined relative to the reference polypeptide of SEQ ID NO: 496 and defined as follows:
“+” 0.55 to 0.58,
“++” >0.58,
“+++” >0.60

### Example 5

### Evolution and Screening of Engineered Polypeptides Derived from SEQ ID NO: 860 for Improved Production of Compound (3)

[0274] The engineered polynucleotide (SEQ ID NO: 859) encoding the polypeptide with nitroaldolase activity of SEQ ID NO: 860 was used to generate the engineered polypeptides of Table 5-1. These polypeptides displayed improved nitroaldolase activity under the desired conditions e.g., the improvement in the formation of the β-nitro alcohol, compound (3), from the substrates trifluoroacetone and nitromethane, compounds (1) and (2), respectively, as compared to the starting polypeptide. Similarly, the engineered polypeptides of Table 5-2 displayed improved nitroaldolase selectivity towards the desired (S)-alcohol. The engineered polypeptides, having the amino acid sequences of even-numbered sequence identifiers were generated from the “backbone” amino acid sequence of SEQ ID NO: 860, as described below.

[0275] Directed evolution began with the polynucleotide set forth in SEQ ID NO: 859. Libraries of engineered polypeptides were generated using various well-known techniques (e.g., saturation mutagenesis, recombination of previously identified beneficial amino acid differences) and screened using HTP assay and analysis methods that measured the polypeptide's ability to produce compound (3).

[0276] The enzyme assay and analysis were carried using the same method as described in EXAMPLE 3.

[0277] Hit variants were grown in 250 mL shake flasks, and enzyme powders were generated as described in EXAMPLE 1. The activity of the enzyme powders was evaluated as described in EXAMPLE 3. These hit variants are denoted with a * in Tables 5-1 and 5-2.

TABLE 5-1
Nitroaldolase Activity for the Production
of Compound (3) Relative to SEQ ID NO: 860

| | | Fold |
|---|---|---|
| | | Improvement |
| | | in Activity |
| SEQ | | Relative to |
| ID NO: | Amino Acid Differences | SEQ ID |
| (nt/aa) | (Relative to SEQ ID NO: 860) | NO: 860 |
| 981/982 | S103T | +++ |
| 983/984 | S43M/S103V/V146I/E180V | +++ |
| 985/986* | S103V/V146I/E180L/K241R | +++ |
| 987/988* | I12V/S43M/T63P/S103L/V146I/E180L/ | +++ |
| | S232G/K241R | |
| 989/990 | I12V/S43M/G81F/S103L/K241R | +++ |
| 991/992 | S43Q/S103V/V146I/E180L | +++ |
| 993/994 | S43M/E180L/S232G | +++ |
| 995/996 | I12V/S43Q/S103L/V146I/E180V/S232G/ | +++ |
| | K241R | |
| 997/998 | I12V/V146I | +++ |
| 999/1000 | S103T/A261V | +++ |
| 1001/1002 | I12V/E180L/S232G/K241R | +++ |
| 1003/1004 | I12V/S43M/G81F/V146I/S232G/K241R | +++ |
| 1005/1006 | I12V/S43M/G81F/K241R | +++ |
| 1007/1008 | I12V/S43M/E180L/K241R | ++ |
| 1009/1010 | V146I/E180V/S232G | ++ |
| 1011/1012 | I12V/S43Q/S103L/E180V/K241R | ++ |
| 1013/1014 | I12V/S43M/S103V/K241R | ++ |
| 1015/1016 | S43M/S103L/V146I/E180V | ++ |
| 1017/1018 | I12V/S43Q/S103L/V146I/E180V/K241R | ++ |
| 1019/1020 | S103A | ++ |
| 1021/1022 | I12V/S103V/E180V/K241R | ++ |
| 1023/1024 | S43M/S103L/E180V/K241R | ++ |
| 1025/1026 | I12V/S43M/S103L/E180L/K241R | ++ |
| 1027/1028 | I12V/S103L/V146I/K241R | ++ |
| 1029/1030* | I12V/S43M/V146I/E180L/S232G/K241R | ++ |
| 1031/1032 | T144V | ++ |
| 1033/1034* | I12V/S43M/S103V/V146I/E180V/K241R | ++ |
| 1035/1036 | I12V/G81F/E180V/K241R | ++ |
| 1037/1038 | I12V/S43M/G81F/S232G/K241R | ++ |
| 1039/1040 | K241R | ++ |
| 1041/1042 | V146I/E180L/K241R | ++ |
| 1043/1044 | V166L | ++ |
| 1045/1046 | R172L | ++ |
| 1047/1048 | I12V/K241R | ++ |
| 1049/1050 | V146I/K241R | + |
| 1051/1052 | S103L/E180L | + |
| 1053/1054 | T63P/S103L/E180L/S232G | + |
| 1055/1056 | S103N | + |
| 1057/1058 | S43M/G81F/S232G/K241R | + |
| 1059/1060 | S103L/E180V/K241R | + |
| 1061/1062 | S103L/V146I/E180V | + |
| 1063/1064 | S103L/V146I | + |
| 1065/1066 | I12V/G81F | + |
| 1067/1068 | S103L | + |
| 1069/1070* | I12V/S103L/E180L/K241R | + |
| 1071/1072 | G81F/E180L/K241R | + |
| 1073/1074 | A145V | + |
| 1075/1076 | I12V | + |
| 1077/1078 | I12V/V146I/E180L/K241R | + |
| 1079/1080 | S43M/S232G/K241R | + |
| 1081/1082 | L18V | + |
| 1083/1084 | I12V/S43M/G81F/E180V/K241R | + |
| 1085/1086 | I12V/E180V/S232G/K241R | + |
| 1087/1088 | E180L/S232G | + |
| 1089/1090 | G81F/V146I/K241R | + |
| 1091/1092 | R172V | + |
| 1093/1094 | I12V/S43Q/T63P/S103L/V146I/K241R | + |
| 1095/1096 | G81F/S103L/V146I | + |
| 1097/1098 | S232G/K241R | + |
| 1099/1100 | G81F/V146I/E180L/K241R | + |
| 1101/1102 | I12V/S43Q/S103V | + |
| 1103/1104 | D150H | + |
| 1105/1106 | S43M/S103L/K241R | + |
| 1107/1108 | I12V/S43M/S103L/K241R | + |
| 1109/1110 | I12V/T63P/G81F/S103L/K241R | + |
| 1111/1112 | I12V/S43M/E180V/K241R | + |
| 1113/1114 | G81Q | + |
| 1115/1116 | I84Y | + |
| 1117/1118 | G78A | + |

Levels of increased activity were determined relative to the reference polypeptide of SEQ ID NO: 860 and defined as follows:
“+” 1.12 to 1.28,
“++” >1.28,
“+++” >1.39

TABLE 5-2
Nitroaldolase Selectivity for the Production
of Compound (3) Relative to SEQ ID NO: 860

| | | Improvement |
|---|---|---|
| | | in Selectivity |
| SEQ | | Relative to |
| ID NO: | Amino Acid Differences | SEQ ID |
| (nt/aa) | (Relative to SEQ ID NO: 860) | NO: 860 |
| 1119/1120* | I12V/S103V/E180L/K241R | +++ |
| 1121/1122* | Q208F | +++ |
| 1033/1034* | I12V/S43M/S103V/V146I/E180V/K241R | +++ |
| 985/986* | S103V/V146I/E180L/K241R | +++ |
| 1123/1124* | S103N | +++ |
| 1125/1126 | S103A | +++ |
| 987/988* | I12V/S43M/T63P/S103L/V146I/E180L/ | +++ |
| | S232G/K241R | |
| 1127/1128 | S103T | +++ |
| 1069/1070* | I12V/S103L/E180L/K241R | +++ |
| 1029/1030* | I12V/S43M/V146I/E180L/S232G/K241R | +++ |
| 991/992 | S43Q/S103V/V146I/E180L | +++ |
| 983/984 | S43M/S103V/V146I/E180V | +++ |
| 1017/1018 | I12V/S43Q/S103L/V146I/E180V/K241R | +++ |
| 1015/1016 | S43M/S103L/V146I/E180V | +++ |
| 1041/1042 | V146I/E180L/K241R | +++ |
| 1129/1130 | I12V/S43Q/T63P/S103V/V146I/K241R | ++ |
| 1021/1022 | I12V/S103V/E180V/K241R | ++ |
| 1131/1132 | S43Q/S103V/E180L/K241R | ++ |
| 1133/1134 | I12V/S43M/S103L/V146I/K241R | ++ |
| 1025/1026 | I12V/S43M/S103L/E180L/K241R | ++ |
| 1135/1136 | I12V/S43M/E180L/S232G | ++ |
| 1031/1032 | T144V | ++ |
| 1077/1078 | I12V/V146I/E180L/K241R | ++ |
| 1137/1138 | S43Q/S103V/E180V/S232G/K241R | ++ |
| 1061/1062 | S103L/V146I/E180V | ++ |
| 1139/1140 | S103L/E180V/K241R | ++ |
| 1087/1088 | E180L/S232G | ++ |
| 1007/1008 | I12V/S43M/E180L/K241R | ++ |
| 1085/1086 | I12V/E180V/S232G/K241R | ++ |
| 1141/1142 | I12V/T63P/S103L/V146I/S232G/K241R | ++ |
| 1143/1144 | I12V/S43Q/S103L/V146I/K241R | ++ |
| 1145/1146 | I12V/S103L/E180V/K241R | ++ |
| 1147/1148 | I12V/E180L/K241R | ++ |
| 1011/1012 | I12V/S43Q/S103L/E180V/K241R | ++ |
| 1001/1002 | I12V/E180L/S232G/K241R | ++ |
| 1149/1150 | S43M/S103L/E180V/K241R | ++ |
| 995/996 | I12V/S43Q/S103L/V146I/E180V/S232G/ | ++ |
| | K241R | |
| 1151/1152 | S103L/V146I/E180V/K241R | ++ |
| 1153/1154 | I12V/E180L | + |
| 1051/1052 | S103L/E180L | + |
| 1155/1156 | I12V/V146I/S232G/K241R | + |
| 993/994 | S43M/E180L/S232G | + |
| 997/998 | I12V/V146I | + |
| 1157/1158 | E180V/S232G | + |
| 1159/1160 | I12V/K241R | + |
| 1161/1162 | E180V/S232G/K241R | + |
| 1163/1164 | I12V | + |
| 1165/1166 | S103L/K241R | + |
| 1167/1168 | I12V/V146I/K241R | + |
| 1169/1170 | I12V/S43M/S103V/V146I/S232G/K241R | + |
| 1053/1054 | T63P/S103L/E180L/S232G | + |
| 1171/1172 | I12V/E180V/K241R | + |
| 1173/1174 | I12V/S103V/V146I/K241R | + |
| 1175/1176 | I12V/S43Q/V146I/K241R | + |
| 1177/1178 | E180L/K241R | + |
| 1179/1180 | S43M/T63P/S103L/E180V/S232G/K241R | + |
| 1181/1182 | S103V/E180V/K241R | + |
| 1183/1184 | S43Q/S103L/E180V/S232G/K241R | + |
| 1185/1186 | S43M/S103L/E180V | + |
| 1187/1188 | I12V/E180V | + |
| 1189/1190 | R172C | + |
| 1067/1068 | S103L | + |
| 1191/1192 | Y118V | + |
| 1193/1194 | K119H | + |
| 1195/1196 | A145V | + |
| 1045/1046 | R172L | + |
| 1197/1198 | S122H | + |
| 1199/1200 | R212P | + |
| 1081/1082 | L18V | + |
| 1201/1202 | S211F | + |
| 1203/1204 | T144H | + |
| 1205/1206 | Y118L | + |
| 1091/1092 | R172V | + |
| 1207/1208 | N160L | + |
| 1209/1210 | I9V | + |
| 1211/1212 | A154R | + |

Levels of increased selectivity (fraction of product that is the (S)-alcohol) were determined relative to the reference polypeptide of SEQ ID NO: 860 and defined as follows:
“+” 0.56 to 0.62,
“++” >0.62,
“+++” >0.64

### Example 6

### Evolution and Screening of Engineered Polypeptides Derived from SEQ ID NO: 1120 for Improved Production of Compound (3)

[0278] The engineered polynucleotide (SEQ ID NO: 1119) encoding the polypeptide with nitroaldolase activity of SEQ ID NO: 1120 was used to generate the engineered polypeptides of Table 6-1. These polypeptides displayed improved nitroaldolase activity under the desired conditions e.g., the improvement in the formation of the β-nitro alcohol, compound (3), from the substrates trifluoroacetone and nitromethane, compounds (1) and (2), respectively, as compared to the starting polypeptide. Similarly, the engineered polypeptides of Table 6-2 displayed improved nitroaldolase selectivity towards the desired (S)-alcohol. The engineered polypeptides, having the amino acid sequences of even-numbered sequence identifiers were generated from the “backbone” amino acid sequence of SEQ ID NO: 1120, as described below.

[0279] Directed evolution began with the polynucleotide set forth in SEQ ID NO: 1119. Libraries of engineered polypeptides were generated using various well-known techniques (e.g., saturation mutagenesis, recombination of previously identified beneficial amino acid differences) and screened using HTP assay and analysis methods that measured the polypeptide's ability to produce compound (3).

[0280] The enzyme assay and analysis were carried using the method as described in EXAMPLE 3 except that the nitromethane (2) concentration was increased to 0.75 M and the pH was decreased to pH 5.5.

[0281] Hit variants were grown in 250 mL shake flasks, and enzyme powders were generated as described in EXAMPLE 1. The activity of the enzyme powders was evaluated as described in EXAMPLE 3 except the trifluoroacetone (1) concentration was increased to 0.525 M, the nitromethane concentration was increased to 0.75 M and the pH was decreased to pH 5.5; the hit variants are denoted with a * in Tables 6-1 and 6-2.

TABLE 6-1
Nitroaldolase Activity for the Production
of Compound (3) Relative to SEQ ID NO: 1120

| | | Fold |
|---|---|---|
| | | Improvement |
| SEQ | | in Activity |
| ID NO: | Amino Acid Differences | Relative to |
| (nt/aa) | (Relative to SEQ ID NO: 1120) | SEQ ID NO: 1120 |
| 1213/1214 | I7V/F158Y | +++ |
| 1215/1216 | S3D | +++ |
| 1217/1218 | E55R | +++ |
| 1219/1220 | Y118V/R172L/L180V | +++ |
| 1221/1222 | K223L | +++ |
| 1223/1224 | I7V/F158Y/I197V/V202I | +++ |
| 1225/1226 | A154R | +++ |
| 1227/1228 | V103L/A154R | +++ |
| 1229/1230 | V103L | +++ |
| 1231/1232 | V103L/T144V/V146I/R172L/L180V | +++ |
| 1233/1234 | Q27E/S43I/R172L | +++ |
| 1235/1236 | E59T | +++ |
| 1237/1238 | L48I/R172L | +++ |
| 1239/1240 | E55A | ++ |
| 1241/1242 | V146I | ++ |
| 1243/1244 | K226V | ++ |
| 1245/1246 | I7V | ++ |
| 1247/1248 | N32G | ++ |
| 1249/1250 | Y118V | ++ |
| 1251/1252 | Y118V/T144V/Q215H | ++ |
| 1253/1254 | A263G | ++ |
| 1255/1256 | V146I/A154R | ++ |
| 1257/1258 | V103L/V146I/A154R/R172L/L180V/ | ++ |
| | S232G | |
| 1259/1260 | P94Q/V103L/Y118V/V146I | ++ |
| 1261/1262 | E55S | ++ |
| 1263/1264 | I7V/F158Y/K175P | ++ |
| 1265/1266 | A29G | ++ |
| 1267/1268 | F158Y | ++ |
| 1269/1270 | T137M | ++ |
| 1271/1272 | R46V | ++ |
| 1273/1274 | R172L/T190S | ++ |
| 1275/1276 | G71S | ++ |
| 1277/1278 | A261G | ++ |
| 1279/1280 | A263S | + |
| 1281/1282 | Q27E/S43I/A115S/R172L | + |
| 1283/1284 | K223M | + |
| 1285/1286 | K72G | + |
| 1287/1288 | C229W | + |
| 1289/1290 | S43I/I110T/A115S/R172L | + |
| 1291/1292 | K73R | + |
| 1293/1294 | R46H | + |
| 1295/1296 | K223S | + |
| 1297/1298 | R198L | + |
| 1299/1300 | E55G | + |
| 1301/1302 | A263L | + |
| 1303/1304 | K226L | + |
| 1305/1306 | T137R | + |
| 1307/1308 | A29R | + |
| 1309/1310 | E59G | + |
| 1311/1312 | K223C | + |
| 1313/1314 | L216M | + |
| 1315/1316 | K223E | + |
| 1317/1318 | A263E | + |
| 1319/1320 | N32R | + |
| 1321/1322 | K223A | + |
| 1323/1324 | C229L | + |
| 1325/1326 | L216V | + |
| 1327/1328 | T142V | + |
| 1329/1330 | S67N | + |
| 1331/1332 | E205G | + |
| 1333/1334 | Q247V | + |
| 1335/1336 | A261H | + |
| 1337/1338 | N44S | + |
| 1339/1340 | E205L | + |
| 1341/1342 | D184S | + |
| 1343/1344 | C229V | + |

Levels of increased activity were determined relative to the reference polypeptide of SEQ ID NO: 1120 and defined as follows:
“+” 1.20 to 1.34,
“++” >1.34,
“+++” >1.47

TABLE 6-2
Nitroaldolase Selectivity for the Production
of Compound (3) Relative to SEQ ID NO: 1120

| | Amino Acid Differences | Improvement in Selectivity |
|---|---|---|
| SEQ ID NO: | (Relative to SEQ ID NO: | Relative to SEQ ID NO: |
| (nt/aa) | 1120) | 1120 |
| 1345/1346* | S80G | +++ |
| 1347/1348* | S80A | +++ |
| 1349/1350 | V103L/V146I/I209C | ++ |
| 1351/1352 | R172C/L180V/I209C | ++ |
| 1353/1354 | Y118V/K119H/R172C/I209C | ++ |
| 1355/1356 | T144V/I209C/S232G | + |
| 1357/1358 | V103L/R172C/I209C | + |
| 1359/1360 | N135V | + |
| 1361/1362 | Q181S | + |
| 1363/1364 | K223E | + |
| 1365/1366 | K73R | + |

Levels of increased selectivity (fraction of product that is the (S)-alcohol) were determined relative to the reference polypeptide of SEQ ID NO: 1120 and defined as follows:
“+” 0.84 to 0.85,
“++” >0.85,
“+++” >0.87

### Example 7

### Evolution and Screening of Engineered Polypeptides Derived from SEQ ID NO: 1348 for Improved Production of Compound (3)

[0282] The engineered polynucleotide (SEQ ID NO: 1347) encoding the polypeptide with nitroaldolase activity of SEQ ID NO: 1348 was used to generate the engineered polypeptides of Table 6-1. These polypeptides displayed improved nitroaldolase activity under the desired conditions e.g., the improvement in the formation of the β-nitro alcohol, compound (3), from the substrates trifluoroacetone and nitromethane, compounds (1) and (2), respectively, as compared to the starting polypeptide. Similarly, the engineered polypeptides of Table 6-2 displayed improved nitroaldolase selectivity towards the desired (S)-alcohol. The engineered polypeptides, having the amino acid sequences of even-numbered sequence identifiers were generated from the “backbone” amino acid sequence of SEQ ID NO: 1348, as described below.

[0283] Directed evolution began with the polynucleotide set forth in SEQ ID NO: 1347. Libraries of engineered polypeptides were generated using various well-known techniques (e.g., saturation mutagenesis, recombination of previously identified beneficial amino acid differences) and screened using HTP assay and analysis methods that measured the polypeptide's ability to produce compound (3).

[0284] The enzyme assay and analysis were carried using the method as described in EXAMPLE 6 except that the trifluoroacetone (1) concentration was increased to 0.525 M and the reaction time was decreased to 6 hours.

[0285] Hit variants were grown in 250 mL shake flasks, and enzyme powders were generated as described in EXAMPLE 1. The activity of the enzyme powders was evaluated as described in EXAMPLE 6 except that the reaction time was decreased to 6 hours; the hit variants are denoted with a * in Tables 7-1 and 7-2.

TABLE 7-1
Nitroaldolase Activity for the Production
of Compound (3) Relative to SEQ ID NO: 1348

| | | Fold |
|---|---|---|
| | | Improvement |
| SEQ | | in Activity |
| ID NO: | Amino Acid Differences | Relative to |
| (nt/aa) | (Relative to SEQ ID NO: 1348) | SEQ ID NO: 1348 |
| 1367/1368* | W39S | +++ |
| 1369/1370* | W39T | +++ |
| 1371/1372* | R46H/E55R/A263L | +++ |
| 1373/1374* | R46H/E70N/K175P/A263G | +++ |
| 1375/1376 | R46H/E55R/Y118V | +++ |
| 1377/1378 | A105G | +++ |
| 1379/1380 | W39V | ++ |
| 1381/1382 | Y118V/K226V/A261G/A263I | ++ |
| 1383/1384 | R46H/Y118V | ++ |
| 1385/1386 | W39Q | ++ |
| 1387/1388 | R46H/E55R | ++ |
| 1389/1390 | R46H/E55R/K72C | ++ |
| 1391/1392 | E55R/A263G | ++ |
| 1393/1394 | R46H/K72C | ++ |
| 1395/1396 | R46H/E55R/K226V/S257Q/A263L | + |
| 1397/1398 | W39F | + |
| 1399/1400 | R46H/E70N | + |
| 1401/1402 | V2G | + |
| 1403/1404 | W39M | + |
| 1405/1406 | R46H/E55R/K92A | + |
| 1407/1408 | R46H/E70N/K92A/Y118V/A261G/ | + |
| | A263L | |
| 1409/1410 | I7V/R46H | + |
| 1411/1412 | R46H | + |
| 1413/1414 | Y118V | + |
| 1415/1416 | A263G | + |
| 1417/1418 | E55R/A261G/A263I | + |
| 1419/1420 | W39G | + |
| 1421/1422 | E55R/S257Q/A261G | + |

Levels of increased activity were determined relative to the reference polypeptide of SEQ ID NO: 1348 and defined as follows:
“+” 1.50 to 1.73,
“++” >1.73,
“+++” >2.01

TABLE 7-2
Nitroaldolase Selectivity for the Production
of Compound (3) Relative to SEQ ID NO: 1348

| | | Improvement in |
|---|---|---|
| SEQ | | Selectivity |
| ID NO: | Amino Acid Differences | Relative to |
| (nt/aa) | (Relative to SEQ ID NO: 1348) | SEQ ID NO: 1348 |
| 1423/1424* | R46H/E55R/Y118V/A263S | +++ |
| 1371/1372* | R46H/E55R/A263L | +++ |
| 1381/1382 | Y118V/K226V/A261G/A263I | +++ |
| 1375/1376 | R46H/E55R/Y118V | +++ |
| 1413/1414 | Y118V | +++ |
| 1425/1426 | W39S | +++ |
| 1427/1428 | A105G | +++ |
| 1383/1384 | R46H/Y118V | +++ |
| 1373/1374* | R46H/E70N/K175P/A263G | +++ |
| 1429/1430 | W39T | +++ |
| 1401/1402 | V2G | ++ |
| 1421/1422 | E55R/S257Q/A261G | ++ |
| 1411/1412 | R46H | ++ |
| 1431/1432 | R46H/K92A | ++ |
| 1433/1434 | R46H/V146I | ++ |
| 1435/1436 | L22V/R46H/E55R/Y118V | ++ |
| 1437/1438 | E55R/S257Q/A263L | ++ |
| 1439/1440 | Q27G/Y118V | ++ |
| 1441/1442 | R46H/E55R/V146I/V202I | ++ |
| 1409/1410 | I7V/R46H | ++ |
| 1443/1444 | I7V/R46H/K175P | ++ |
| 1399/1400 | R46H/E70N | ++ |
| 1391/1392 | E55R/A263G | ++ |
| 1445/1446 | E70N | ++ |
| 1447/1448 | V146I/A261G/A263L | ++ |
| 1379/1380 | W39V | ++ |
| 1449/1450 | R46H/E55R | + |
| 1403/1404 | W39M | + |
| 1385/1386 | W39Q | + |
| 1451/1452 | R46H/E55R/E59T/A261G/A263L | + |
| 1415/1416 | A263G | + |
| 1453/1454 | A261G/A263I | + |
| 1405/1406 | R46H/E55R/K92A | + |
| 1455/1456 | V202I | + |
| 1389/1390 | R46H/E55R/K72C | + |
| 1457/1458 | E55R/E70N/Y118V | + |
| 1459/1460 | R46H/K92A/K175P | + |
| 1461/1462 | R46H/K72C | + |
| 1463/1464 | S257Q/A261G/A263G | + |
| 1465/1466 | V146I/S257Q/A263S | + |
| 1467/1468 | R46H/E55R/V146I | + |
| 1469/1470 | K92A/Y118V | + |
| 1417/1418 | E55R/A261G/A263I | + |
| 1471/1472 | Q27G/R46H/V146I/F158Y/V202I | + |
| 1473/1474 | R46H/V146I/S257Q/A263I | + |
| 1407/1408 | R46H/E70N/K92A/Y118V/A261G/ | + |
| | A263L | |
| 1475/1476 | Q27G/R46H/K72C | + |
| 1395/1396 | R46H/E55R/K226V/S257Q/A263L | + |
| 1477/1478 | A29V/E70N/Y118V | + |
| 1479/1480 | E192V/S257Q/A261G | + |
| 1481/1482 | Q27G/R46H/K175P | + |
| 1483/1484* | W39V | + |

Levels of increased selectivity (fraction of product that is the (S)-alcohol) were determined relative to the reference polypeptide of SEQ ID NO: 1348 and defined as follows:
“+” 0.92 to 0.94,
“++” >0.94,
“+++” >0.95

### Example 8

### Analytical Detection of Conversion of Compounds (1) and (2) to Compound (3)

[0286] Data described in EXAMPLE 2 through EXAMPLE 4 were collected using the analytical methods provided in Table 8-1 and Table 8-2. The methods provided herein find use in analyzing the variants produced using the present invention. However, it is not intended that present invention be limited to the methods described herein, as there are other suitable methods known in the art that are applicable to the analysis of the variants provided herein and/or produced using the methods provided herein.

TABLE 8-1
GC Parameters
Method for Determining Conversion of
Compound (1) and (2) to Compound (3)

| | |
|---|---|
| Instrument | Agilent 6890 GC |
| Column | Supelco Astec Chiraldex B-DM, 30 m × |
| | 0.25 mm × 0.12 μm film (77023AST) |
| Carrier gas and flow rate | Helium, 3.0 mL/min (constant flow control) |
| Column temperature | 100° C., isothermal |
| Detector and temperature | FID, 250° C. |
| Inlet temperature and | 250° C., 20:1 |
| split ratio | |
| Injection volume | 1 μL |
| Product retention time | (S)-alcohol: 2.71 min |
| | (R)-alcohol: 2.81 min |

TABLE 8-2
GC Parameters
Method for Determining Conversion of Compound
(1) and (2) to Compound (3)

| | |
|---|---|
| Instrument | Agilent 6890 GC |
| Column | Restek βDEXsm, 30 m × 0.25 mm × 0.25 μm |
| | film (13105) |
| Carrier gas and flow rate | Helium, 3.0 mL/min (constant flow control) |
| Column temperature | 120° C., isothermal |
| Detector and temperature | FID, 250° C. |
| Inlet temperature and | 250° C., 20:1 |
| split ratio | |
| Injection volume | 1 μL |
| Product retention time | (S)-alcohol: 2.87 min |
| | (R)-alcohol: 2.93 min |

[0287] Data described in EXAMPLE 5 were collected using the analytical methods provided in Table 8-3 and Table 8-4. Data described in EXAMPLE 6 and EXAMPLE 7 were collected using the analytical method provided in Table 8-4. The methods provided herein find use in analyzing the variants produced using the present invention. However, it is not intended that present invention be limited to the methods described herein, as there are other suitable methods known in the art that are applicable to the analysis of the variants provided herein and/or produced using the methods provided herein.

TABLE 8-3
GC Parameters
Method for Determining Conversion of
Compound (1) and (2) to Compound (3)

| | |
|---|---|
| Instrument | Agilent 6890 GC |
| Column | Supelco β-DEX 325, 30 m × |
| | 0.25 mm × 0.25 μm film, (24308) |
| Carrier gas and flow rate | Helium, 10.0 mL/min (constant flow control) |
| Column temperature | 100° C., isothermal |
| Detector and temperature | FID, 250° C. |
| Inlet temperature and | 250° C., 60:1 |
| split ratio | |
| Injection volume | 1 μL |
| Product retention time | (S)-alcohol: 1.80 min |
| | (R)-alcohol: 1.86 min |

TABLE 8-4
GC Parameters
Method for Determining Conversion of
Compound (1) and (2) to Compound (3)

| | |
|---|---|
| Instrument | Agilent 6890 GC |
| Column | Astec CHIRALDEX G-TA, 30 m × |
| | 0.25 mm × 0.12 μm film, (73033AST) |
| Carrier gas and flow rate | Helium, 10.0 mL/min (constant flow control) |
| Column temperature | 130° C., isothermal |
| Detector and temperature | FID, 250° C. |
| Inlet temperature and | 250° C., 60:1 |
| split ratio | |
| Injection volume | 1 μL |
| Product retention time | (S)-alcohol: 1.16 min |
| | (R)-alcohol: 1.10 min |

[0288] All publications, patents, patent applications and other documents cited in this application are hereby incorporated by reference in their entireties for all purposes to the same extent as if each individual publication, patent, patent application or other document were individually indicated to be incorporated by reference for all purposes.

[0289] While various specific embodiments have been illustrated and described, it will be appreciated that various changes can be made without departing from the spirit and scope of the invention(s).

The application's sequence listing, which the Patent Office published only in electronic form, follows.

SEQUENCE LISTING (1484 sequences)

SEQ ID NO: 1 - DNA, 789 bp, synthetic construct
  misc_feature 1..789: note = Round 1 (Selectivity)
  source 1..789: mol_type = other DNA
atggttagtgcgcattttattctgatccacaccatttgccatggcgcctggctctggtataaactgatcccgttattacagtctgcaggtcataacgctacggcgattgatcttgtggctagcgggatcgaccctcgccaactggaacagattggcacatgggagcagtactcagaaccattgttcaccctgatcgaatcgattccggaaggtaagaaagtcattctggtaggagaatccggtggcggcatcaatattgcactggccgcggagaaatatccggagaaagtgagcgccctcgtctttcacaacgcacttatgcccgatatcgatcacagtccagcgttcgtgtacaagaaatttagcgaagttttcactgactggaaagattcgatcttcagcaattatacctacggtaacgacacggttaccgcggtggaattgggagatcgtactctggccgagaacatcttctccaattctccgattgaagatgtagaactggcgaaacatctggtccgcaaaggctccttctttgagcaagacttggataccctgccgaactttacgtcggaagggtatggttcaattcgtcgtgtgtatgtttacggcgaagaagaccagatctttagccgcgattttcagttatggcaaattaataattataagcctgataaagtgtactgtgtaccgagtgctgaccacaagattcagatcagcaaagtcaacgagctggcccagattctccaagaagttgcaaactctgcgagtgatcttcttgcagtggct

SEQ ID NO: 2 - protein, 263 aa, synthetic construct [sequence omitted]

SEQ ID NO: 3 - DNA, 789 bp, synthetic construct
  misc_feature 1..789: note = Round 1 (Activity)
  source 1..789: mol_type = other DNA
atggttagtgcgcattttattctgatccacaccatttgccatggcgcctggctgtggtataaactgatcccgttattacagtctgcaggtcataacgctacggcgattgatcttgtggctagcgggatcgaccctcgccaactggaacagattggcacatgggagcagtactcagaaccattgttcaccctgatcgaatcgctgccggaaggtaagaaagtcattctggtaggagaatccggtggcggcatcaatattgcactggccgcggagaaatatccggagaaaattagcgccctcgtctttcacaacgcacttatgcccgatatcgatcacagtccagcgttcgtgtacaagaaatttagcgaagttttcactgactggaaagattcgatcttcagcaattatacctacggtaacgacacggttaccgcggtggaattgggagatcgtactctggccgagaacatcttctccaattctccgattgaagatgtagaactggcgaaacatctggtccgcccaggctccttctttgagcaagacttggataccctgccgaactttacgtcggaagggtatggttcagttcgtcgtgtgtatgtctacggcgaagaagaccagatctttagccgcgattttcagttatggcaaattaataattatcctcctgataaagtgtactgtgtaccgagtgctgaccacaagatccagattagcaaagtcaacgagctggcccagattctccaagaagttgcaaactctgcgagtgatcttcttgcagtggct

SEQ ID NO: 4 - protein, 263 aa, synthetic construct
  REGION 1..263: note = Round 1 (Activity)
MVSAHFILIHTICHGAWLWYKLIPLLQSAGHNATAIDLVASGIDPRQLEQIGTWEQYSEPLFTLIESLPEGKKVILVGESGGGINIALAAEKYPEKISALVFHNALMPDIDHSPAFVYKKFSEVFTDWKDSIFSNYTYGNDTVTAVELGDRTLAENIFSNSPIEDVELAKHLVRPGSFFEQDLDTLPNFTSEGYGSVRRVYVYGEEDQIFSRDFQLWQINNYPPDKVYCVPSADHKIQISKVNELAQILQEVANSASDLLAVA

SEQ ID NO: 5 - DNA, 789 bp, synthetic construct
  misc_feature 1..789: note = Round 1 (Activity)
  source 1..789: mol_type = other DNA
atggttagtgcgcattttattctgattcacacgatttgccatggcgcctggctctggtataaactgatcccgttattacagtctgcaggtcataacgtcacggcgattgatcttgtggctagcgggatcgaccctcgccaactggaacagattggcacatgggagcagtactcagaaccattgttcaccctgatcgaatcgatcccggaaggtgagaaagtcattctggtaggagaatccggtggcggcatcaatattgcactggccgcggagaaatatccggagaaaattagcgccctcgtctttcacaacgcacttatgcccgatatcgatcacagtccagcgttcgtgtacaagaaatttagcgaagttttcactgactggaaagattcgatcttcagcaattatacctacggtaacgacacggttaccgcggtggaattgggagatcgtactctggccgagaacatcttctccaattctccgattgaagatgtagaactggcgaaacatctggtccgcaaaggctccttctttgagcaagacttggataccctgccgaactttacgtcggaagggtatggttcagttcgtcgtgtgtatgtctacggcgaagaagaccagatctttagccgcgattttcagttatggcaaattaataattataagcctgataaagtgtactgtgtcccgagtgctgaccacaagattcagatcagcaaagtcaacgagctggcccagattctccaagaagttgcaaactctgcgagtgatcttcttgcagtggct

SEQ ID NO: 6 - protein, 263 aa, synthetic construct
  REGION 1..263: note = Round 1 (Activity)
MVSAHFILIHTICHGAWLWYKLIPLLQSAGHNVTAIDLVASGIDPRQLEQIGTWEQYSEPLFTLIESIPEGEKVILVGESGGGINIALAAEKYPEKISALVFHNALMPDIDHSPAFVYKKFSEVFTDWKDSIFSNYTYGNDTVTAVELGDRTLAENIFSNSPIEDVELAKHLVRKGSFFEQDLDTLPNFTSEGYGSVRRVYVYGEEDQIFSRDFQLWQINNYKPDKVYCVPSADHKIQISKVNELAQILQEVANSASDLLAVA

SEQ ID NO: 7 - DNA, 789 bp, synthetic construct
  misc_feature 1..789: note = Round 1 (Activity)
  source 1..789: mol_type = other DNA
atggttagtgcgcattttattctggttcacacgatttgccatggcgcctggctctggtataaactgatcccgttattacagtctgcaggtcataacgtcacggcgattgatcttgtggctagcgggatcgaccctcgccaactggaacagattggcacatgggagcagtactcagaaccattgttcaccctgatcgaatcgattccggaaggtaagaaagtcattctggtaggagaatccggtggcggcatcaatattgcactggccgcggagaaatatccggagaaaattagcgccctcgtctttcacaacgcacttatgcccgatatcgatcacagtccagcgttcgtgtacaagaaatttagcgaagttttcactgactggaaagattcgatcttcagcaattatacctacggtaacgacacggttaccgcggtggaattgggagatcgtactctggccgagaacatcttctccaattctccgattgaagatgtagaactggcgaaacatctggtccgcaaaggctccttctttgagcaagacttggataccctgccgaactttacgtcggaagggtatggttcaattcgtcgtgtgtatgtttacggcgaagaagaccagatctttagccgcgattttcagttatggcaaattaataattataagcctgataaagtgtactgtatcccgagtgctgaccacaagattcagatcagcaaagtcaacgagctggcccagattctccaagaagttgcaaactctgcgagtgatcttcttgcagtggct

SEQ ID NO: 8 - protein, 263 aa, synthetic construct
  REGION 1..263: note = Round 1 (Activity)
MVSAHFILVHTICHGAWLWYKLIPLLQSAGHNVTAIDLVASGIDPRQLEQIGTWEQYSEPLFTLIESIPEGKKVILVGESGGGINIALAAEKYPEKISALVFHNALMPDIDHSPAFVYKKFSEVFTDWKDSIFSNYTYGNDTVTAVELGDRTLAENIFSNSPIEDVELAKHLVRKGSFFEQDLDTLPNFTSEGYGSIRRVYVYGEEDQIFSRDFQLWQINNYKPDKVYCIPSADHKIQISKVNELAQILQEVANSASDLLAVA

SEQ ID NO: 9 - DNA, 789 bp, synthetic construct
  misc_feature 1..789: note = Round 1 (Activity)
  source 1..789: mol_type = other DNA
atggttagtgcgcattttattctgatccacaccatttgccatggcgcctggctctggtataaactgatcccgttattacagtctgcaggtcataacgctacggcgattgatcttgtggctagcgggatcgaccctcgccaactggaacagattggcacatgggagcagtactcagaaccattgttcaccctgatcgaatcgattccggaaggtaagaaagtcattctggtaggagaatccggtggcggcatcaatattgcactggccgcggagaaatatccggagaaagtgagcgccctcgtctttagtaacgcacttatgcccgatatcgatcacagtccagcgttcgtgtacaagaaatttagcgaagttttcactgactggaaagattcgatcttcagcaattatacctacggtaacgacacggttaccgcggtggaattgggagatcgtactctggccgagaacatcttctccaattctccgattgaagatgtagaactggcgaaacatctggtccgcaaaggctccttctttgagcaagacttggataccctgccgaactttacgtcggaagggtatggttcaattcgtcgtgtgtatgtttacggcgaagaagaccagatctttagccgcgattttcagttatggcaaattaataattataagcctgataaagtgtactgtgtaccgagtgctgaccacaagattcagatcagcaaagtcaacgagctggcccagattctccaagaagttgcaaactctgcgagtgatcttcttgcagtggct

SEQ ID NO: 10 - protein, 263 aa, synthetic construct
  REGION 1..263: note = Round 1 (Activity)
MVSAHFILIHTICHGAWLWYKLIPLLQSAGHNATAIDLVASGIDPRQLEQIGTWEQYSEPLFTLIESIPEGKKVILVGESGGGINIALAAEKYPEKVSALVFSNALMPDIDHSPAFVYKKFSEVFTDWKDSIFSNYTYGNDTVTAVELGDRTLAENIFSNSPIEDVELAKHLVRKGSFFEQDLDTLPNFTSEGYGSIRRVYVYGEEDQIFSRDFQLWQINNYKPDKVYCVPSADHKIQISKVNELAQILQEVANSASDLLAVA

SEQ ID NO: 11 - DNA, 789 bp, synthetic construct
  misc_feature 1..789: note = Round 1 (Activity)
  source 1..789: mol_type = other DNA
atggttagtgcgcattttattctgatccacaccatttgccatggcgcctggtgttggtataaactgatcccgttattacagtctgcaggtcataacgctacggcgattgatcttgtggctagcgggatcgaccctcgccaactggaacagattggcacatgggagcagtactcagaaccattgttcaccctgatcgaatcgatcccggaaggtaagaaagtcattctggtaggagaatccggtggcggcatcaatattgcactggccgcggagaaatatccggagaaaattagcgccctcgtctttcacaacgcacttatgcccgatatcgatcacagtccagcgttcgtgtacaagaaatttagcgaagttttcactgactggaaagattcgatcttcagcaattatacctacggtaacgacacggttaccgcggtggaattgggagatcgtactctggccgagaacatcttctccaattctccgattgaagatgtagaactggcgaaacatctggtccgcaagggctccttctttgagcaagacttggataccctgccgaactttacgtcggaagggtatggttcaattcgtcgtgtgtatgtttacggcgaagaagaccagatctttagccgcgattttcagttatggcaaattaataattatcctcctgataaagtgtactgtgtaccgagtgctgaccacaagcctcagtttagcaaagtcaacgagctggcccagattctccaagaagttgcaaactctgcgagtgatcttcttgcagtggct

SEQ ID NO: 12 - protein, 263 aa, synthetic construct
  REGION 1..263: note = Round 1 (Activity)
MVSAHFILIHTICHGAWCWYKLIPLLQSAGHNATAIDLVASGIDPRQLEQIGTWEQYSEPLFTLIESIPEGKKVILVGESGGGINIALAAEKYPEKISALVFHNALMPDIDHSPAFVYKKFSEVFTDWKDSIFSNYTYGNDTVTAVELGDRTLAENIFSNSPIEDVELAKHLVRKGSFFEQDLDTLPNFTSEGYGSIRRVYVYGEEDQIFSRDFQLWQINNYPPDKVYCVPSADHKPQFSKVNELAQILQEVANSASDLLAVA

SEQ ID NO: 13 - DNA, 789 bp, synthetic construct
  misc_feature 1..789: note = Round 1 (Activity)
  source 1..789: mol_type = other DNA
atggttagtgcgcattttattctgatccacaccatttgccatggcgcctggctgtggtataaactgatcccgttattacagtctgcaggtcataacgctacggcgattgatcttgtggctagcgggatcgaccctcgccaactggaacagattggcacatgggagcagtactcagaaccattgttcaccctgatcgaatcgattccggaaggtgagaaagtcattctggtaggagaatccggtggcggcatcaatattgcactggccgcggagaaatatccggagaaagtgagcgccctcgtctttcacaacgcacttatgcccgatatcgatcacagtccagcgttcgtgtacaagaaatttagcgaagttttcactgactggaaagattcgatcttcagcaattatacctacggtaacgacacggttaccgcggtggaattgggagatcgtactctggccgagaacatcttctccaattctccgattgaagatgtagaactggcgaaacatctggtccgcccaggctccttctttgagcaagacttggataccctgccgaactttacgtcggaagggtatggttcagttcgtcgtgtgtatgtctacggcgaagaagaccagatctttagccgcgattttcagttatggcaaattaataattataaacctgataaagtgtactgtgtaccgagtgctgaccacaagatccagattagcaaagtcaacgagctggcccagattctccaagaagttgcaaactctgcgagtgatcttcttgcagtggct

SEQ ID NO: 14 - protein, 263 aa, synthetic construct
  REGION 1..263: note = Round 1 (Activity)
MVSAHFILIHTICHGAWLWYKLIPLLQSAGHNATAIDLVASGIDPRQLEQIGTWEQYSEPLFTLIESIPEGEKVILVGESGGGINIALAAEKYPEKVSALVFHNALMPDIDHSPAFVYKKFSEVFTDWKDSIFSNYTYGNDTVTAVELGDRTLAENIFSNSPIEDVELAKHLVRPGSFFEQDLDTLPNFTSEGYGSVRRVYVYGEEDQIFSRDFQLWQINNYKPDKVYCVPSADHKIQISKVNELAQILQEVANSASDLLAVA

SEQ ID NO: 15 - DNA, 789 bp, synthetic construct
  misc_feature 1..789: note = Round 1 (Activity)
  source 1..789: mol_type = other DNA
atggttagtgcgcattttattctgatccacaccatttgccatggcgcctggctgtggtataaactgatcccgttattacagtctgcaggtcataacgctacggcgattgatcttgtggctagcgggatcgaccctcgccaactggaacagattggcacatgggagcagtactcagaaccattgttcaccctgatcgaatcgctgccggaaggtgagaaagtcattctggtaggagaatccggtggcggcatcaatattgcactggccgcggagaaatatccggagaaaattagcgccctcgtctttcacaacgcacttatgcccgatatcgatcacagtccagcgttcgtgtacaagaaatttagcgaagttttcactgactggaaagattcgatcttcagcaattatacctacggtaacgacacggttaccgcggtggaattgggagatcgtactctggccgagaacatcttctccaattctccgattgaagatgtagaactggcgaaacatctggtccgcaaaggctccttctttgagcaagacttggataccctgccgaactttacgtcggaagggtatggttcaattcgtcgtgtgtatgtttacggcgaagaagaccagatctttagccgcgattttcagttatggcaaattaataattataagcctgataaagtgtactgtgtaccgagtgctgaccacaagatccagattagcaaagtcaacgagctggcccagattctccaagaagttgcaaactctgcgagtgatcttcttgcagtggct

SEQ ID NO: 16 - protein, 263 aa, synthetic construct
  REGION 1..263: note = Round 1 (Activity)
MVSAHFILIHTICHGAWLWYKLIPLLQSAGHNATAIDLVASGIDPRQLEQIGTWEQYSEPLFTLIESLPEGEKVILVGESGGGINIALAAEKYPEKISALVFHNALMPDIDHSPAFVYKKFSEVFTDWKDSIFSNYTYGNDTVTAVELGDRTLAENIFSNSPIEDVELAKHLVRKGSFFEQDLDTLPNFTSEGYGSIRRVYVYGEEDQIFSRDFQLWQINNYKPDKVYCVPSADHKIQISKVNELAQILQEVANSASDLLAVA

SEQ ID NO: 17 - DNA, 789 bp, synthetic construct
  misc_feature 1..789: note = Round 1 (Activity)
  source 1..789: mol_type = other DNA
atggttagtgcgcattttattctgatccacaccatttgccatggcgcctggctctggtataaactgatcccgttattacagtctgcaggtcataacgctacggcgattgatcttgtggctagcgggatcgaccctcgccaactggaacagattggcacatgggagcagtactcagaaccattgttcaccctgatcgaatcgctgccggaaggtgagaaagtcattctggtaggagaatccggtggcggcatcaatattgcactggccgcggagaaatatccggagaaaattagcgccctcgtctttcacaacgcacttatgcccgatatcgatcacagtccagcgttcgtgtacaagaaatttagcgaagttttcactgactggaaagattcgatcttcagcaattatacctacggtaacgacacggttaccgcggtggaattgggagatcgtactctggccgagaacatcttctccaattctccgattgaagatgtagaactggcgaaacatctggtccgcaagggctccttctttgagcaagacttggataccctgccgaactttacgtcggaagggtatggttcagttcgtcgtgtgtatgtctacggcgaagaagaccagatctttagccgcgattttcagttatggcaaattaataattataagcctgataaagtgtactgtgtcccgagtgctgaccacaagattcagatcagcaaagtcaacgagctggcccagattctccaagaagttgcaaactctgcgagtgatcttcttgcagtggct

SEQ ID NO: 18 - protein, 263 aa, synthetic construct
  REGION 1..263: note = Round 1 (Activity)
MVSAHFILIHTICHGAWLWYKLIPLLQSAGHNATAIDLVASGIDPRQLEQIGTWEQYSEPLFTLIESLPEGEKVILVGESGGGINIALAAEKYPEKISALVFHNALMPDIDHSPAFVYKKFSEVFTDWKDSIFSNYTYGNDTVTAVELGDRTLAENIFSNSPIEDVELAKHLVRKGSFFEQDLDTLPNFTSEGYGSVRRVYVYGEEDQIFSRDFQLWQINNYKPDKVYCVPSADHKIQISKVNELAQILQEVANSASDLLAVA

SEQ ID NO: 19 - DNA, 789 bp, synthetic construct
  misc_feature 1..789: note = Round 1 (Activity)
  source 1..789: mol_type = other DNA
atggttagtgcgcattttattctggttcacacgatttgccatggcgcctggctctggtataaactgatcccgttattacagtctgcaggtcataacgctacggcgattgatcttgtggctagcgggatcgaccctcgccaactggaacagattggcacatgggagcagtactcagaaccattgttcaccctgatcgaatcgctgccggaaggtgagaaagtcattctggtaggagaatccggtggcggcatcaatattgcactggccgcggagaaatatccggagaaagttagcgccctcgtctttcacaacgcacttatgcccgatatcgatcacagtccagcgttcgtgtacaagaaatttagcgaagttttcactgactggaaagattcgatcttcagcaattatacctacggtaacgacacggttaccgcggtggaattgggagatcgtactctggccgagaacatcttctccaattctccgattgaagatgtagaactggcgaaacatctggtccgcaaaggctccttctttgagcaagacttggataccctgccgaactttacgtcggaagggtatggttcaattcgtcgtgtgtatgtctacggcgaagaagaccagatctttagccgcgattttcagttatggcagattaataattataagcctgataaagtgtactgtgtaccgagtgctgaccacaagatccagattagcaaagtcaacgagctggcccagattctccaagaagttgcaaactctgcgagtgatcttcttgcagtggct

SEQ ID NO: 20 - protein, 263 aa, synthetic construct
  REGION 1..263: note = Round 1 (Activity)
MVSAHFILVHTICHGAWLWYKLIPLLQSAGHNATAIDLVASGIDPRQLEQIGTWEQYSEPLFTLIESLPEGEKVILVGESGGGINIALAAEKYPEKVSALVFHNALMPDIDHSPAFVYKKFSEVFTDWKDSIFSNYTYGNDTVTAVELGDRTLAENIFSNSPIEDVELAKHLVRKGSFFEQDLDTLPNFTSEGYGSIRRVYVYGEEDQIFSRDFQLWQINNYKPDKVYCVPSADHKIQISKVNELAQILQEVANSASDLLAVA

SEQ ID NO: 21 - DNA, 789 bp, synthetic construct
  misc_feature 1..789: note = Round 1 (Activity)
  source 1..789: mol_type = other DNA
atggttagtgcgcattttattctgatccacaccattgggcatggcgcctggctctggtataaactgatcccgttattacagtctgcaggtcataacgctacggcgattgatcttgtggctagcgggatcgaccctcgccaactggaacagattggcacatgggagcagtactcagaaccattgttcaccctgatcgaatcgattccggaaggtaagaaagtcattctggtaggagaatccggtggcggcatcaatattgcactggccgcggagaaatatccggagaaagtgagcgccctcgtctttcacaacgcacttatgcccgatatcgatcacagtccagcgttcgtgtacaagaaatttagcgaagttttcactgactggaaagattcgatcttcagcaattatacctacggtaacgacacggttaccgcggtggaattgggagatcgtactctggccgagaacatcttctccaattctccgattgaagatgtagaactggcgaaacatctggtccgcaaaggctccttctttgagcaagacttggataccctgccgaactttacgtcggaagggtatggttcaattcgtcgtgtgtatgtttacggcgaagaagaccagatctttagccgcgattttcagttatggcaaattaataattataagcctgataaagtgtactgtgtaccgagtgctgaccacaagattcagatcagcaaagtcaacgagctggcccagattctccaagaagttgcaaactctgcgagtgatcttcttgcagtggct

SEQ ID NO: 22 - protein, 263 aa, synthetic construct
  REGION 1..263: note = Round 1 (Activity)
MVSAHFILIHTIGHGAWLWYKLIPLLQSAGHNATAIDLVASGIDPRQLEQIGTWEQYSEPLFTLIESIPEGKKVILVGESGGGINIALAAEKYPEKVSALVFHNALMPDIDHSPAFVYKKFSEVFTDWKDSIFSNYTYGNDTVTAVELGDRTLAENIFSNSPIEDVELAKHLVRKGSFFEQDLDTLPNFTSEGYGSIRRVYVYGEEDQIFSRDFQLWQINNYKPDKVYCVPSADHKIQISKVNELAQILQEVANSASDLLAVA

SEQ ID NO: 23 - DNA, 789 bp, synthetic construct
  misc_feature 1..789: note = Round 2 (Selectivity)
  source 1..789: mol_type = other DNA
atggttagtgcgcattttattctgatccacagtatttgccatggcgcctggctctggtataaactgatcccgttattacagtctgcaggtcataacgctacggcgattgatcttgtggctagcgggatcgaccctcgccaactggaacagattggcacatgggagcagtactcagaaccattgttcaccctgatcgaatcgattccggaaggtaagaaagtcattctggtaggagaatccggtggcggcatcaatattgcactggccgcggagaaatatccggagaaagtgagcgccctcgtctttcacaacgcacttatgcccgatatcgatcacagtccagcgttcgtgtacaagaaatttagcgaagttttcactgactggaaagattcgatcttcagcaattatacctacggtaacgacacggttaccgcggtggaattgggagatcgtactctggccgagaacatcttctccaattctccgattgaagatgtagaactggcgaaacatctggtccgcaaaggctccttctttgagcaagacttggataccctgccgaactttacgtcggaagggtatggttcaattcgtcgtgtgtatgtttacggcgaagaagaccagatctttagccgcgattttcagttatggcaaattaataattataagcctgataaagtgtactgtgtaccgagtgctgaccacaagattcagatcagcaaagtcaacgagctggcccagattctccaagaagttgcaaactctgcgagtgatcttcttgcagtggct

SEQ ID NO: 24 - protein, 263 aa, synthetic construct
  REGION 1..263: note = Round 2 (Selectivity)
MVSAHFILIHSICHGAWLWYKLIPLLQSAGHNATAIDLVASGIDPRQLEQIGTWEQYSEPLFTLIESIPEGKKVILVGESGGGINIALAAEKYPEKVSALVFHNALMPDIDHSPAFVYKKFSEVFTDWKDSIFSNYTYGNDTVTAVELGDRTLAENIFSNSPIEDVELAKHLVRKGSFFEQDLDTLPNFTSEGYGSIRRVYVYGEEDQIFSRDFQLWQINNYKPDKVYCVPSADHKIQISKVNELAQILQEVANSASDLLAVA

SEQ ID NO: 25 - DNA, 789 bp, synthetic construct
  misc_feature 1..789: note = Round 1 (Activity)
  source 1..789: mol_type = other DNA
atggttagtgcgcattttattctgatccacaccatttgccatggcgcctggtgttggtataaactgatcccgttattacagtctgcaggtcataacgccacggcgattgatcttgtggctagcgggatcgaccctcgccaactggaacagattggcacatgggagcagtactcagaaccattgttcaccctgatcgaatcgatcccggaaggtgagaaagtcattctggtaggagaatccggtggcggcatcaatattgcactggccgcggagaaatatccggagaaaattagcgccctcgtctttcacaacgcacttatgcccgatatcgatcacagtccagcgttcgtgtacaagaaatttagcgaagttttcactgactggaaagattcgatcttcagcaattatacctacggtaacgacacggttaccgcggtggaattgggagatcgtactctggccgagaacatcttctccaattctccgattgaagatgtagaactggcgaaacatctggtccgcccaggctccttctttgagcaagacttggataccctgccgaactttacgtcggaagggtatggttcaattcgtcgtgtgtatgtctacggcgaagaagaccagatctttagccgcgattttcagttatggcaaattaataattataagcctgataaagtgtactgtgtaccgagtgctgaccacaagcctcagtttagcaaagtcaacgagctggcccagattctccaagaagttgcaaactctgcgagtgatcttcttgcagtggct

SEQ ID NO: 26 - protein, 263 aa, synthetic construct
  REGION 1..263: note = Round 1 (Activity)
MVSAHFILIHTICHGAWCWYKLIPLLQSAGHNATAIDLVASGIDPRQLEQIGTWEQYSEPLFTLIESIPEGEKVILVGESGGGINIALAAEKYPEKISALVFHNALMPDIDHSPAFVYKKFSEVFTDWKDSIFSNYTYGNDTVTAVELGDRTLAENIFSNSPIEDVELAKHLVRPGSFFEQDLDTLPNFTSEGYGSIRRVYVYGEEDQIFSRDFQLWQINNYKPDKVYCVPSADHKPQFSKVNELAQILQEVANSASDLLAVA

SEQ ID NO: 27 - DNA, 789 bp, synthetic construct
  misc_feature 1..789: note = Round 1 (Activity)
  source 1..789: mol_type = other DNA
atggttagtgcgcattttgttctgattcacacgatttgccatggcgcctggctctggtataaactgatcccgttattacagtctgcaggtcataacgctacggcgattgatcttgtggctagcgggatcgaccctcgccaactggaacagattggcacatgggagcagtactcagaaccattgttcaccctgatcgaatcgatcccggaaggtgagaaagtcattctggtaggagaatccggtggcggcatcaatattgcactggccgcggagaaatatccggagaaaattagcgccctcgtctttcacaacgcacttatgcccgatatcgatcacagtccagcgttcgtgtacaagaaatttagcgaagttttcactgactggaaagattcgatcttcagcaattatacctacggtaacgacacggttaccgcggtggaattgggagatcgtactctggccgagaacatcttctccaattctccgattgaagatgtagaactggcgaaacatctggtccgcccaggctccttctttgagcaagacttggataccctgccgaactttacgtcggaagggtatggttcaattcgtcgtgtgtatgtttacggcgaagaagaccagatctttagccgcgattttcagttatggcaaattaataattataagcctgataaagtgtactgtatcccgagtgctgaccacaagattcagatcagcaaagtcaacgagctggcccagattctccaagaagttgcaaactctgcgagtgatcttcttgcagtggct

SEQ ID NO: 28 - protein, 263 aa, synthetic construct
  REGION 1..263: note = Round 1 (Activity)
MVSAHFVLIHTICHGAWLWYKLIPLLQSAGHNATAIDLVASGIDPRQLEQIGTWEQYSEPLFTLIESIPEGEKVILVGESGGGINIALAAEKYPEKISALVFHNALMPDIDHSPAFVYKKFSEVFTDWKDSIFSNYTYGNDTVTAVELGDRTLAENIFSNSPIEDVELAKHLVRPGSFFEQDLDTLPNFTSEGYGSIRRVYVYGEEDQIFSRDFQLWQINNYKPDKVYCIPSADHKIQISKVNELAQILQEVANSASDLLAVA

SEQ ID NO: 29 - DNA, 789 bp, synthetic construct
  misc_feature 1..789: note = Round 1 (Activity)
  source 1..789: mol_type = other DNA
atggttagtgcgcattttattctgattcacacgatttgccatggcgcctggctctggtataaactgatcccgttattacagtctgcaggtcataacgtcacggcgattgatcttgtggctagcgggatcgaccctcgccaactggaacagattggcacatgggagcagtactcagaaccattgttcaccctgatcgaatcgatcccggaaggtgagaaagtcattctggtaggagaatccggtggcggcatcaatattgcactggccgcggagaaatatccggagaaagttagcgccctcgtctttcacaacgcacttatgcccgatatcgatcacagtccagcgttcgtgtacaagaaatttagcgaagttttcactgactggaaagattcgatcttcagcaattatacctacggtaacgacacggttaccgcggtggaattgggagatcgtactctggccgagaacatcttctccaattctccgattgaagatgtagaactggcgaaacatctggtccgcccaggctccttctttgagcaagacttggataccctgccgaactttacgtcggaagggtatggttcaattcgtcgtgtgtatgtttacggcgaagaagaccagatctttagccgcgattttcagttatggcagattaataattataagcctgataaagtgtactgtgtaccgagtgctgaccacaagatccagattagcaaagtcaacgagctggcccagattctccaagaagttgcaaactctgcgagtgatcttcttgcagtggct

SEQ ID NO: 30 - protein, 263 aa, synthetic construct
  REGION 1..263: note = Round 1 (Activity)
MVSAHFILIHTICHGAWLWYKLIPLLQSAGHNVTAIDLVASGIDPRQLEQIGTWEQYSEPLFTLIESIPEGEKVILVGESGGGINIALAAEKYPEKVSALVFHNALMPDIDHSPAFVYKKFSEVFTDWKDSIFSNYTYGNDTVTAVELGDRTLAENIFSNSPIEDVELAKHLVRPGSFFEQDLDTLPNFTSEGYGSIRRVYVYGEEDQIFSRDFQLWQINNYKPDKVYCVPSADHKIQISKVNELAQILQEVANSASDLLAVA

SEQ ID NO: 31 - DNA, 789 bp, synthetic construct
  misc_feature 1..789: note = Round 1 (Activity)
  source 1..789: mol_type = other DNA
atggttagtgcgcattttgttctgattcacacgatttgccatggcgcctggctctggtataaactgatcccgttattacagtctgcaggtcataacgccacggcgattgatcttgtggctagcgggatcgaccctcgccaactggaacagattggcacatgggagcagtactcagaaccattgttcaccctgatcgaatcgctgccggaaggtgagaaagtcattctggtaggagaatccggtggcggcatcaatattgcactggccgcggagaaatatccggagaaagtgagcgccctcgtctttcacaacgcacttatgcccgatatcgatcacagtccagcgttcgtgtacaagaaatttagcgaagttttcactgactggaaagattcgatcttcagcaattatacctacggtaacgacacggttaccgcggtggaattgggagatcgtactctggccgagaacatcttctccaattctccgattgaagatgtagaactggcgaaacatctggtccgcccaggctccttctttgagcaagacttggataccctgccgaactttacgtcggaagggtatggttcaattcgtcgtgtgtatgtttacggcgaagaagaccagatctttagccgcgattttcagttatggcaaattaataattataagcctgataaagtgtactgtgtcccgagtgctgaccacaagattcagatcagcaaagtcaacgagctggcccagattctccaagaagttgcaaactctgcgagtgatcttcttgcagtggct

SEQ ID NO: 32 - protein, 263 aa, synthetic construct
  REGION 1..263: note = Round 1 (Activity)
MVSAHFVLIHTICHGAWLWYKLIPLLQSAGHNATAIDLVASGIDPRQLEQIGTWEQYSEPLFTLIESLPEGEKVILVGESGGGINIALAAEKYPEKVSALVFHNALMPDIDHSPAFVYKKFSEVFTDWKDSIFSNYTYGNDTVTAVELGDRTLAENIFSNSPIEDVELAKHLVRPGSFFEQDLDTLPNFTSEGYGSIRRVYVYGEEDQIFSRDFQLWQINNYKPDKVYCVPSADHKIQISKVNELAQILQEVANSASDLLAVA

SEQ ID NO: 33 - DNA, 789 bp, synthetic construct
  misc_feature 1..789: note = Round 1 (Activity)
  source 1..789: mol_type = other DNA
atggttagtgcgcattttgttctggttcacacgatttgccatggcgcctggctctggtataaactgatcccgttattacagtctgcaggtcataacgctacggcgattgatcttgtggctagcgggatcgaccctcgccaactggaacagattggcacatgggagcagtactcagaaccattgttcaccctgatcgaatcgctgccggaaggtgagaaagtcattctggtaggagaatccggtggcggcatcaatattgcactggccgcggagaaatatccggagaaagttagcgccctcgtctttcacaacgcacttatgcccgatatcgatcacagtccagcgttcgtgtacaagaaatttagcgaagttttcactgactggaaagattcgatcttcagcaattatacctacggtaacgacacggttaccgcggtggaattgggagatcgtactctggccgagaacatcttctccaattctccgattgaagatgtagaactggcgaaacatctggtccgcaagggctccttctttgagcaagacttggataccctgccgaactttacgtcggaagggtatggttcagttcgtcgtgtgtatgtctacggcgaagaagaccagatctttagccgcgattttcagttatggcaaattaataattataagcctgataaagtgtactgtgtaccgagtgctgaccacaagattcagatcagcaaagtcaacgagctggcccagattctccaagaagttgcaaactctgcgagtgatcttcttgcagtggct

SEQ ID NO: 34 - protein, 263 aa, synthetic construct
  REGION 1..263: note = Round 1 (Activity)
MVSAHFVLVHTICHGAWLWYKLIPLLQSAGHNATAIDLVASGIDPRQLEQIGTWEQYSEPLFTLIESLPEGEKVILVGESGGGINIALAAEKYPEKVSALVFHNALMPDIDHSPAFVYKKFSEVFTDWKDSIFSNYTYGNDTVTAVELGDRTLAENIFSNSPIEDVELAKHLVRKGSFFEQDLDTLPNFTSEGYGSVRRVYVYGEEDQIFSRDFQLWQINNYKPDKVYCVPSADHKIQISKVNELAQILQEVANSASDLLAVA

SEQ ID NO: 35 - DNA, 789 bp, synthetic construct
  misc_feature 1..789: note = Round 1 (Activity)
  source 1..789: mol_type = other DNA
atggttagtgcgcattttattctgatccacaccatttgccatggcgcctggtgttggtataaactgatcccgttattacagtctgcaggtcataacgtcacggcgattgatcttgtggctagcgggatcgaccctcgccaactggaacagattggcacatgggagcagtactcagaaccattgttcaccctgatcgaatcgatcccggaaggtgagaaagtcattctggtaggagaatccggtggcggcatcaatattgcactggccgcggagaaatatccggagaaaattagcgccctcgtctttcacaacgcacttatgcccgatatcgatcacagtccagcgttcgtgtacaagaaatttagcgaagttttcactgactggaaagattcgatcttcagcaattatacctacggtaacgacacggttaccgcggtggaattgggagatcgtactctggccgagaacatcttctccaattctccgattgaagatgtagaactggcgaaacatctggtccgcccaggctccttctttgagcaagacttggataccctgccgaactttacgtcggaagggtatggttcaattcgtcgtgtgtatatctacggcgaagaagaccagatctttagccgcgattttcagttatggcaaattaataattataaacctgataaagtgtactgtgtaccgagtgctgaccacaagatccagattagcaaagtcaacgagctggcccagattctccaagaagttgcaaactctgcgagtgatcttcttgcagtggct

SEQ ID NO: 36 - protein, 263 aa, synthetic construct
  REGION 1..263: note = Round 1 (Activity)
MVSAHFILIHTICHGAWCWYKLIPLLQSAGHNVTAIDLVASGIDPRQLEQIGTWEQYSEPLFTLIESIPEGEKVILVGESGGGINIALAAEKYPEKISALVFHNALMPDIDHSPAFVYKKFSEVFTDWKDSIFSNYTYGNDTVTAVELGDRTLAENIFSNSPIEDVELAKHLVRPGSFFEQDLDTLPNFTSEGYGSIRRVYIYGEEDQIFSRDFQLWQINNYKPDKVYCVPSADHKIQISKVNELAQILQEVANSASDLLAVA

SEQ ID NO: 37 - DNA, 789 bp, synthetic construct
  misc_feature 1..789: note = Round 1 (Activity)
  source 1..789: mol_type = other DNA
atggttagtgcgcattttattctgatccacaccatttgccatggcgcctggctgtggtataaactgatcccgttattacagtctgcaggtcataacgtcacggcgattgatcttgtggctagcgggatcgaccctcgccaactggaacagattggcacatgggagcagtactcagaaccattgttcaccctgatcgaatcgctgccggaaggtgagaaagtcattctggtaggagaatccggtggcggcatcaatattgcactggccgcggagaaatatccggagaaagttagcgccctcgtctttcacaacgcacttatgcccgatatcgatcacagtccagcgttcgtgtacaagaaatttagcgaagttttcactgactggaaagattcgatcttcagcaattatacctacggtaacgacacggttaccgcggtggaattgggagatcgtactctggccgagaacatcttctccaattctccgattgaagatgtagaactggcgaaacatctggtccgcaaaggctccttctttgagcaagacttggataccctgccgaactttacgtcggaagggtatggttcaattcgtcgtgtgtatgtttacggcgaagaagaccagatctttagccgcgattttcagttatggcaaattaataattataagcctgataaagtgtactgtgtaccgagtgctgaccacaagatccagattagcaaagtcaacgagctggcccagattctccaagaagttgcaaactctgcgagtgatcttcttgcagtggct

SEQ ID NO: 38 - protein, 263 aa, synthetic construct
  REGION 1..263: note = Round 1 (Activity)
MVSAHFILIHTICHGAWLWYKLIPLLQSAGHNVTAIDLVASGIDPRQLEQIGTWEQYSEPLFTLIESLPEGEKVILVGESGGGINIALAAEKYPEKVSALVFHNALMPDIDHSPAFVYKKFSEVFTDWKDSIFSNYTYGNDTVTAVELGDRTLAENIFSNSPIEDVELAKHLVRKGSFFEQDLDTLPNFTSEGYGSIRRVYVYGEEDQIFSRDFQLWQINNYKPDKVYCVPSADHKIQISKVNELAQILQEVANSASDLLAVA

SEQ ID NO: 39 - DNA, 789 bp, synthetic construct
  misc_feature 1..789: note = Round 1 (Activity)
  source 1..789: mol_type = other DNA
atggttagtgcgcattttattctgatccacaccatttgccatggcgcctggtgttggtataaactgatcccgttattacagtctgcaggtcataacgtcacggcgattgatcttgtggctagcgggatcgaccctcgccaactggaacagattggcacatgggagcagtactcagaaccattgttcaccctgatcgaatcgatcccggaaggtgagaaagtcattctggtaggagaatccggtggcggcatcaatattgcactggccgcggagaaatatccggagaaagttagcgccctcgtctttcacaacgcacttatgcccgatatcgatcacagtccagcgttcgtgtacaagaaatttagcgaagttttcactgactggaaagattcgatcttcagcaattatacctacggtaacgacacggttaccgcggtggaattgggagatcgtactctggccgagaacatcttctccaattctccgattgaagatgtagaactggcgaaacatctggtccgcccaggctccttctttgagcaagacttggataccctgccgaactttacgtcggaagggtatggttcaattcgtcgtgtgtatatctacggcgaagaagaccagatctttagccgcgattttcagttatggcaaattaataattataaacctgataaagtgtactgtgtaccgagtgctgaccacaagcctcagtttagcaaagtcaacgagctggcccagattctccaagaagttgcaaactctgcgagtgatcttcttgcagtggct

SEQ ID NO: 40 - protein, 263 aa, synthetic construct
  REGION 1..263: note = Round 1 (Activity)
MVSAHFILIHTICHGAWCWYKLIPLLQSAGHNVTAIDLVASGIDPRQLEQIGTWEQYSEPLFTLIESIPEGEKVILVGESGGGINIALAAEKYPEKVSALVFHNALMPDIDHSPAFVYKKFSEVFTDWKDSIFSNYTYGNDTVTAVELGDRTLAENIFSNSPIEDVELAKHLVRPGSFFEQDLDTLPNFTSEGYGSIRRVYIYGEEDQIFSRDFQLWQINNYKPDKVYCVPSADHKPQFSKVNELAQILQEVANSASDLLAVA

SEQ ID NO: 41 - DNA, 789 bp, synthetic construct
  misc_feature 1..789: note = Round 1 (Activity)
  source 1..789: mol_type = other DNA
atggttagtgcgcattttattctggttcacacgatttgccatggcgcctggctctggtataaactgatcccgttattacagtctgcaggtcataacgctacggcgattgatcttgtggctagcgggatcgaccctcgccaactggaacagattggcacatgggagcagtactcagaaccattgttcaccctgatcgaatcgattccggaaggtaagaaagtcattctggtaggagaatccggtggcggcatcaatattgcactggccgcggagaaatatccggagaaagtgagcgccctcgtctttcacaacgcacttatgcccgatatcgatcacagtccagcgttcgtgtacaagaaatttagcgaagttttcactgactggaaagattcgatcttcagcaattatacctacggtaacgacacggttaccgcggtggaattgggagatcgtactctggccgagaacatcttctccaattctccgattgaagatgtagaactggcgaaacatctggtccgcaagggctccttctttgagcaagacttggataccctgccgaactttacgtcggaagggtatggttcaattcgtcgtgtgtatatctacggcgaagaagaccagatctttagccgcgattttcagttatggcaaattaataattataagcctgataaagtgtactgtgtaccgagtgctgaccacaagatccagattagcaaagtcaacgagctggcccagattctccaagaagttgcaaactctgcgagtgatcttcttgcagtggct

SEQ ID NO: 42 - protein, 263 aa, synthetic construct
  REGION 1..263: note = Round 1 (Activity)
MVSAHFILVHTICHGAWLWYKLIPLLQSAGHNATAIDLVASGIDPRQLEQIGTWEQYSEPLFTLIESIPEGKKVILVGESGGGINIALAAEKYPEKVSALVFHNALMPDIDHSPAFVYKKFSEVFTDWKDSIFSNYTYGNDTVTAVELGDRTLAENIFSNSPIEDVELAKHLVRKGSFFEQDLDTLPNFTSEGYGSIRRVYIYGEEDQIFSRDFQLWQINNYKPDKVYCVPSADHKIQISKVNELAQILQEVANSASDLLAVA

SEQ ID NO: 43 - DNA, 789 bp, synthetic construct
  misc_feature 1..789: note = Round 1 (Activity)
  source 1..789: mol_type = other DNA
atggttagtgcgcattttgttctggttcacacgatttgccatggcgcctggctctggtataaactgatcccgttattacagtctgcaggtcataacgctacggcgattgatcttgtggctagcgggatcgaccctcgccaactggaacagattggcacatgggagcagtactcagaaccattgttcaccctgatcgaatcgattccggaaggtaagaaagtcattctggtaggagaatccggtggcggcatcaatattgcactggccgcggagaaatatccggagaaagtgagcgccctcgtctttcacaacgcacttatgcccgatatcgatcacagtccagcgttcgtgtacaagaaatttagcgaagttttcactgactggaaagattcgatcttcagcaattatacctacggtaacgacacggttaccgcggtggaattgggagatcgtactctggccgagaacatcttctccaattctccgattgaagatgtagaactggcgaaacatctggtccgcccaggctccttctttgagcaagacttggataccctgccgaactttacgtcggaagggtatggttcaattcgtcgtgtgtatgtttacggcgaagaagaccagatctttagccgcgattttcagttatggcaaattaataattataagcctgataaagtgtactgtgtaccgagtgctgaccacaagattcagatcagcaaagtcaacgagctggcccagattctccaagaagttgcaaactctgcgagtgatcttcttgcagtggct

SEQ ID NO: 44 - protein, 263 aa, synthetic construct
  REGION 1..263: note = Round 1 (Activity)
MVSAHFVLVHTICHGAWLWYKLIPLLQSAGHNATAIDLVASGIDPRQLEQIGTWEQYSEPLFTLIESIPEGKKVILVGESGGGINIALAAEKYPEKVSALVFHNALMPDIDHSPAFVYKKFSEVFTDWKDSIFSNYTYGNDTVTAVELGDRTLAENIFSNSPIEDVELAKHLVRPGSFFEQDLDTLPNFTSEGYGSIRRVYVYGEEDQIFSRDFQLWQINNYKPDKVYCVPSADHKIQISKVNELAQILQEVANSASDLLAVA

SEQ ID NO: 45 - DNA, 789 bp, synthetic construct
  misc_feature 1..789: note = Round 1 (Activity)
  source 1..789: mol_type = other DNA
atggttagtgcgcattttattctggttcacacgatttgccatggcgcctggctctggtataaactgatcccgttattacagtctgcaggtcataacgccacggcgattgatcttgtggctagcgggatcgaccctcgccaactggaacagattggcacatgggagcagtactcagaaccattgttcaccctgatcgaatcgattccggaaggtaagaaagtcattctggtaggagaatccggtggcggcatcaatattgcactggccgcggagaaatatccggagaaagttagcgccctcgtctttcacaacgcacttatgcccgatatcgatcacagtccagcgttcgtgtacaagaaatttagcgaagttttcactgactggaaagattcgatcttcagcaattatacctacggtaacgacacggttaccgcggtggaattgggagatcgtactctggccgagaacatcttctccaattctccgattgaagatgtagaactggcgaaacatctggtccgcccaggctccttctttgagcaagacttggataccctgccgaactttacgtcggaagggtatggttcaattcgtcgtgtgtatgtttacggcgaagaagaccagatctttagccgcgattttcagttatggcaaattaataattataagcctgataaagtgtactgtgtaccgagtgctgaccacaagattcagatcagcaaagtcaacgagctggcccagattctccaagaagttgcaaactctgcgagtgatcttcttgcagtggct

SEQ ID NO: 46 - protein, 263 aa, synthetic construct
  REGION 1..263: note = Round 1 (Activity)
MVSAHFILVHTICHGAWLWYKLIPLLQSAGHNATAIDLVASGIDPRQLEQIGTWEQYSEPLFTLIESIPEGKKVILVGESGGGINIALAAEKYPEKVSALVFHNALMPDIDHSPAFVYKKFSEVFTDWKDSIFSNYTYGNDTVTAVELGDRTLAENIFSNSPIEDVELAKHLVRPGSFFEQDLDTLPNFTSEGYGSIRRVYVYGEEDQIFSRDFQLWQINNYKPDKVYCVPSADHKIQISKVNELAQILQEVANSASDLLAVA

SEQ ID NO: 47 - DNA, 789 bp, synthetic construct
  misc_feature 1..789: note = Round 1 (Activity)
  source 1..789: mol_type = other DNA
atggttagtgcgcattttattctgatccacaccatttgccatggcgcctggtgttggtataaactgatcccgttattacagtctgcaggtcataacgctacggcgattgatcttgtggctagcgggatcgaccctcgccaactggaacagattggcacatgggagcagtactcagaaccattgttcaccctgatcgaatcgatcccggaaggtgagaaagtcattctggtaggagaatccggtggcggcatcaatattgcactggccgcggagaaatatccggagaaagttagcgccctcgtctttcacaacgcacttatgcccgatatcgatcacagtccagcgttcgtgtacaagaaatttagcgaagttttcactgactggaaagattcgatcttcagcaattatacctacggtaacgacacggttaccgcggtggaattgggagatcgtactctggccgagaacatcttctccaattctccgattgaagatgtagaactggcgaaacatctggtccgcccaggctccttctttgagcaagacttggataccctgccgaactttacgtcggaagggtatggttcagttcgtcgtgtgtatgtctacggcgaagaagaccagatctttagccgcgattttcagttatggcaaattaataattataagcctgataaagtgtactgtgtaccgagtgctgaccacaagatccagattagcaaagtcaacgagctggcccagattctccaagaagttgcaaactctgcgagtgatcttcttgcagtggct

SEQ ID NO: 48 - protein, 263 aa, synthetic construct
  REGION 1..263: note = Round 1 (Activity)
MVSAHFILIHTICHGAWCWYKLIPLLQSAGHNATAIDLVASGIDPRQLEQIGTWEQYSEPLFTLIESIPEGEKVILVGESGGGINIALAAEKYPEKVSALVFHNALMPDIDHSPAFVYKKFSEVFTDWKDSIFSNYTYGNDTVTAVELGDRTLAENIFSNSPIEDVELAKHLVRPGSFFEQDLDTLPNFTSEGYGSVRRVYVYGEEDQIFSRDFQLWQINNYKPDKVYCVPSADHKIQISKVNELAQILQEVANSASDLLAVA

SEQ ID NO: 49 - DNA, 789 bp, synthetic construct
  misc_feature 1..789: note = Round 1 (Activity)
  source 1..789: mol_type = other DNA
atggttagtgcgcattttattctgatccacaccatttgccatggcgcctggtgttggtataaactgatcccgttattacagtctgcaggtcataacgctacggcgattgatcttgtggctagcgggatcgaccctcgccaactggaacagattggcacatgggagcagtactcagaaccattgttcaccctgatcgaatcgctgccggaaggtgagaaagtcattctggtaggagaatccggtggcggcatcaatattgcactggccgcggagaaatatccggagaaagttagcgccctcgtctttcacaacgcacttatgcccgatatcgatcacagtccagcgttcgtgtacaagaaatttagcgaagttttcactgactggaaagattcgatcttcagcaattatacctacggtaacgacacggttaccgcggtggaattgggagatcgtactctggccgagaacatcttctccaattctccgattgaagatgtagaactggcgaaacatctggtccgcccaggctccttctttgagcaagacttggataccctgccgaactttacgtcggaagggtatggttcaattcgtcgtgtgtatatctacggcgaagaagaccagatctttagccgcgattttcagttatggcaaattaataattataaacctgataaagtgtactgtgtaccgagtgctgaccacaagatccagtttagcaaagtcaacgagctggcccagattctccaagaagttgcaaactctgcgagtgatcttcttgcagtggct

SEQ ID NO: 50 - protein, 263 aa, synthetic construct
  REGION 1..263: note = Round 1 (Activity)
MVSAHFILIHTICHGAWCWYKLIPLLQSAGHNATAIDLVASGIDPRQLEQIGTWEQYSEPLFTLIESLPEGEKVILVGESGGGINIALAAEKYPEKVSALVFHNALMPDIDHSPAFVYKKFSEVFTDWKDSIFSNYTYGNDTVTAVELGDRTLAENIFSNSPIEDVELAKHLVRPGSFFEQDLDTLPNFTSEGYGSIRRVYIYGEEDQIFSRDFQLWQINNYKPDKVYCVPSADHKIQFSKVNELAQILQEVANSASDLLAVA

SEQ ID NO: 51 - DNA, 789 bp, synthetic construct
  misc_feature 1..789: note = Round 1 (Activity)
  source 1..789: mol_type = other DNA
atggttagtgcgcattttattctggttcacacgatttgccatggcgcctggctctggtataaactgatcccgttattacagtctgcaggtcataacgtcacggcgattgatcttgtggctagcgggatcgaccctcgccaactggaacagattggcacatgggagcagtactcagaaccattgttcaccctgatcgaatcgatcccggaaggtgagaaagtcattctggtaggagaatccggtggcggcatcaatattgcactggccgcggagaaatatccggagaaagtgagcgccctcgtctttcacaacgcacttatgcccgatatcgatcacagtccagcgttcgtgtacaagaaatttagcgaagttttcactgactggaaagattcgatcttcagcaattatacctacggtaacgacacggttaccgcggtggaattgggagatcgtactctggccgagaacatcttctccaattctccgattgaagatgtagaactggcgaaacatctggtccgcaagggctccttctttgagcaagacttggataccctgccgaactttacgtcggaagggtatggttcaattcgtcgtgtgtatgtttacggcgaagaagaccagatctttagccgcgattttcagttatggcaaattaataattataagcctgataaagtgtactgtatcccgagtgctgaccacaagattcagatcagcaaagtcaacgagctggcccagattctccaagaagttgcaaactctgcgagtgatcttcttgcagtggct

SEQ ID NO: 52 - protein, 263 aa, synthetic construct
  REGION 1..263: note = Round 1 (Activity)
MVSAHFILVHTICHGAWLWYKLIPLLQSAGHNVTAIDLVASGIDPRQLEQIGTWEQYSEPLFTLIESIPEGEKVILVGESGGGINIALAAEKYPEKVSALVFHNALMPDIDHSPAFVYKKFSEVFTDWKDSIFSNYTYGNDTVTAVELGDRTLAENIFSNSPIEDVELAKHLVRKGSFFEQDLDTLPNFTSEGYGSIRRVYVYGEEDQIFSRDFQLWQINNYKPDKVYCIPSADHKIQISKVNELAQILQEVANSASDLLAVA

SEQ ID NO: 53 - DNA, 789 bp, synthetic construct
  misc_feature 1..789: note = Round 1 (Activity)
  source 1..789: mol_type = other DNA
atggttagtgcgcattttattctggttcacaccatttgccatggcgcctggctctggtataaactgatcccgttattacagtctgcaggtcataacgctacggcgattgatcttgtggctagcgggatcgaccctcgccaactggaacagattggcacatgggagcagtactcagaaccattgttcaccctgatcgaatcgattccggaaggtaagaaagtcattctggtaggagaatccggtggcggcatcaatattgcactggccgcggagaaatatccggagaaagtgagcgccctcgtctttcacaacgcacttatgcccgatatcgatcacagtccagcgttcgtgtacaagaaatttagcgaagttttcactgactggaaagattcgatcttcagcaattatacctacggtaacgacacggttaccgcggtggaattgggagatcgtactctggccgagaacatcttctccaattctccgattgaagatgtagaactggcgaaacatctggtccgcaaaggctccttctttgagcaagacttggataccctgccgaactttacgtcggaagggtatggttcaattcgtcgtgtgtatgtttacggcgaagaagaccagatctttagccgcgattttcagttatggcaaattaataattataagcctgataaagtgtactgtgtaccgagtgctgaccacaagattcagatcagcaaagtcaacgagctggcccagattctccaagaagttgcaaactctgcgagtgatcttcttgcagtggct

SEQ ID NO: 54 - protein, 263 aa, synthetic construct
  REGION 1..263: note = Round 1 (Activity)
MVSAHFILVHTICHGAWLWYKLIPLLQSAGHNATAIDLVASGIDPRQLEQIGTWEQYSEPLFTLIESIPEGKKVILVGESGGGINIALAAEKYPEKVSALVFHNALMPDIDHSPAFVYKKFSEVFTDWKDSIFSNYTYGNDTVTAVELGDRTLAENIFSNSPIEDVELAKHLVRKGSFFEQDLDTLPNFTSEGYGSIRRVYVYGEEDQIFSRDFQLWQINNYKPDKVYCVPSADHKIQISKVNELAQILQEVANSASDLLAVA

SEQ ID NO: 55 - DNA, 789 bp, synthetic construct
  misc_feature 1..789: note = Round 1 (Activity)
  source 1..789: mol_type = other DNA
atggttagtgcgcattttattctgattcacacgatttgccatggcgcctggctctggtataaactgatcccgttattacagtctgcaggtcataacgtcacggcgattgatcttgtggctagcgggatcgaccctcgccaactggaacagattggcacatgggagcagtactcagaaccattgttcaccctgatcgaatcgctgccggaaggtgagaaagtcattctggtaggagaatccggtggcggcatcaatattgcactggccgcggagaaatatccggagaaagtgagcgccctcgtctttcacaacgcacttatgcccgatatcgatcacagtccagcgttcgtgtacaagaaatttagcgaagttttcactgactggaaagattcgatcttcagcaattatacctacggtaacgacacggttaccgcggtggaattgggagatcgtactctggccgagaacatcttctccaattctccgattgaagatgtagaactggcgaaacatctggtccgcccaggctccttctttgagcaagacttggataccctgccgaactttacgtcggaagggtatggttcaattcgtcgtgtgtatgtttacggcgaagaagaccagatctttagccgcgattttcagttatggcaaattaataattataagcctgataaagtgtactgtatcccgagtgctgaccacaagattcagatcagcaaagtcaacgagctggcccagattctccaagaagttgcaaactctgcgagtgatcttcttgcagtggct

SEQ ID NO: 56 - protein, 263 aa, synthetic construct
  REGION 1..263: note = Round 1 (Activity)
MVSAHFILIHTICHGAWLWYKLIPLLQSAGHNVTAIDLVASGIDPRQLEQIGTWEQYSEPLFTLIESLPEGEKVILVGESGGGINIALAAEKYPEKVSALVFHNALMPDIDHSPAFVYKKFSEVFTDWKDSIFSNYTYGNDTVTAVELGDRTLAENIFSNSPIEDVELAKHLVRPGSFFEQDLDTLPNFTSEGYGSIRRVYVYGEEDQIFSRDFQLWQINNYKPDKVYCIPSADHKIQISKVNELAQILQEVANSASDLLAVA

SEQ ID NO: 57 - DNA, 789 bp, synthetic construct
  misc_feature 1..789: note = Round 1 (Activity)
  source 1..789: mol_type = other DNA
atggttagtgcgcattttattctgatccacaccatttgccatggcgcctggctctggtataaactgatcccgttattacagtctgcaggtcataacgctacggcgattgatcttgtggctagcgggatcgaccctcgccaactggaacagattggcacatgggagcagtactcagaaccattgttcaccctgatcgaatcgattccggaaggtaagaaagtcattctggtaggagaatccggtggcggcatcaatattgcactggccgcggagaaatatccggagaaagtgagcgccctcgtctttatgaacgcacttatgcccgatatcgatcacagtccagcgttcgtgtacaagaaatttagcgaagttttcactgactggaaagattcgatcttcagcaattatacctacggtaacgacacggttaccgcggtggaattgggagatcgtactctggccgagaacatcttctccaattctccgattgaagatgtagaactggcgaaacatctggtccgcaaaggctccttctttgagcaagacttggataccctgccgaactttacgtcggaagggtatggttcaattcgtcgtgtgtatgtttacggcgaagaagaccagatctttagccgcgattttcagttatggcaaattaataattataagcctgataaagtgtactgtgtaccgagtgctgaccacaagattcagatcagcaaagtcaacgagctggcccagattctccaagaagttgcaaactctgcgagtgatcttcttgcagtggct

SEQ ID NO: 58 - protein, 263 aa, synthetic construct
  REGION 1..263: note = Round 1 (Activity)
MVSAHFILIHTICHGAWLWYKLIPLLQSAGHNATAIDLVASGIDPRQLEQIGTWEQYSEPLFTLIESIPEGKKVILVGESGGGINIALAAEKYPEKVSALVFMNALMPDIDHSPAFVYKKFSEVFTDWKDSIFSNYTYGNDTVTAVELGDRTLAENIFSNSPIEDVELAKHLVRKGSFFEQDLDTLPNFTSEGYGSIRRVYVYGEEDQIFSRDFQLWQINNYKPDKVYCVPSADHKIQISKVNELAQILQEVANSASDLLAVA

SEQ ID NO: 59 - DNA, 789 bp, synthetic construct
  misc_feature 1..789: note = Round 1 (Activity)
  source 1..789: mol_type = other DNA
atggttagtgcgcattttattctgatccacaccatttgccatggcgcctggtgttggtataaactgatcccgttattacagtctgcaggtcataacgtcacggcgattgatcttgtggctagcgggatcgaccctcgccaactggaacagattggcacatgggagcagtactcagaaccattgttcaccctgatcgaatcgatcccggaaggtgagaaagtcattctggtaggagaatccggtggcggcatcaatattgcactggccgcggagaaatatccggagaaaattagcgccctcgtctttcacaacgcacttatgcccgatatcgatcacagtccagcgttcgtgtacaagaaatttagcgaagttttcactgactggaaagattcgatcttcagcaattatacctacggtaacgacacggttaccgcggtggaattgggagatcgtactctggccgagaacatctactccaattctccgattgaagatgtagaactggcgaaacatctggtccgcaaaggctccttctttgagcaagacttggataccctgccgaactttacgtcggaagggtatggttcaattcgtcgtgtgtatgtttacggcgaagaagaccagatctttagccgcgattttcagttatggcaaattaataattataagcctgataaagtgtactgtgtaccgagtgctgaccacaagatccagtttagcaaagtcaacgagctggcccagattctccaagaagttgcaaactctgcgagtgatcttcttgcagtggct

SEQ ID NO: 60 - protein, 263 aa, synthetic construct
  REGION 1..263: note = Round 1 (Activity)
MVSAHFILIHTICHGAWCWYKLIPLLQSAGHNVTAIDLVASGIDPRQLEQIGTWEQYSEPLFTLIESIPEGEKVILVGESGGGINIALAAEKYPEKISALVFHNALMPDIDHSPAFVYKKFSEVFTDWKDSIFSNYTYGNDTVTAVELGDRTLAENIYSNSPIEDVELAKHLVRKGSFFEQDLDTLPNFTSEGYGSIRRVYVYGEEDQIFSRDFQLWQINNYKPDKVYCVPSADHKIQFSKVNELAQILQEVANSASDLLAVA

SEQ ID NO: 61 - DNA, 789 bp, synthetic construct
  misc_feature 1..789: note = Round 1 (Activity)
  source 1..789: mol_type = other DNA
atggttagtgcgcattttattctgatccacaccatttgccatggcgcctggtgttggtataaactgatcccgttattacagtctgcaggtcataacgtcacggcgattgatcttgtggctagcgggatcgaccctcgccaactggaacagattggcacatgggagcagtactcagaaccattgttcaccctgatcgaatcgatcccggaaggtgagaaagtcattctggtaggagaatccggtggcggcatcaatattgcactggccgcggagaaatatccggagaaagttagcgccctcgtctttcacaacgcacttatgcccgatatcgatcacagtccagcgttcgtgtacaagaaatttagcgaagttttcactgactggaaagattcgatcttcagcaattatacctacggtaacgacacggttaccgcggtggaattgggagatcgtactctggccgagaacatcttctccaattctccgattgaagatgtagaactggcgaaacatctggtccgcaagggctccttctttgagcaagacttggataccctgccgaactttacgtcggaagggtatggttcagttcgtcgtgtgtatgtctacggcgaagaagaccagatctttagccgcgattttcagttatggcaaattaataattataagcctgataaagtgtactgtgtaccgagtgctgaccacaagcctcagattagcaaagtcaacgagctggcccagattctccaagaagttgcaaactctgcgagtgatcttcttgcagtggct

SEQ ID NO: 62 - protein, 263 aa, synthetic construct
  REGION 1..263: note = Round 1 (Activity)
MVSAHFILIHTICHGAWCWYKLIPLLQSAGHNVTAIDLVASGIDPRQLEQIGTWEQYSEPLFTLIESIPEGEKVILVGESGGGINIALAAEKYPEKVSALVFHNALMPDIDHSPAFVYKKFSEVFTDWKDSIFSNYTYGNDTVTAVELGDRTLAENIFSNSPIEDVELAKHLVRKGSFFEQDLDTLPNFTSEGYGSVRRVYVYGEEDQIFSRDFQLWQINNYKPDKVYCVPSADHKPQISKVNELAQILQEVANSASDLLAVA

SEQ ID NO: 63 - DNA, 789 bp, synthetic construct
  misc_feature 1..789: note = Round 1 (Activity)
  source 1..789: mol_type = other DNA
atggttagtgcgcattttgttctggttcacacgatttgccatggcgcctggctctggtataaactgatcccgttattacagtctgcaggtcataacgtcacggcgattgatcttgtggctagcgggatcgaccctcgccaactggaacagattggcacatgggagcagtactcagaaccattgttcaccctgatcgaatcgatcccggaaggtgagaaagtcattctggtaggagaatccggtggcggcatcaatattgcactggccgcggagaaatatccggagaaagttagcgccctcgtctttcacaacgcacttatgcccgatatcgatcacagtccagcgttcgtgtacaagaaatttagcgaagttttcactgactggaaagattcgatcttcagcaattatacctacggtaacgacacggttaccgcggtggaattgggagatcgtactctggccgagaacatcttctccaattctccgattgaagatgtagaactggcgaaacatctggtccgcccaggctccttctttgagcaagacttggataccctgccgaactttacgtcggaagggtatggttcagttcgtcgtgtgtatgtctacggcgaagaagaccagatctttagccgcgattttcagttatggcaaattaataattataagcctgataaagtgtactgtatcccgagtgctgaccacaagattcagatcagcaaagtcaacgagctggcccagattctccaagaagttgcaaactctgcgagtgatcttcttgcagtggct

SEQ ID NO: 64 - protein, 263 aa, synthetic construct
  REGION 1..263: note = Round 1 (Activity)
MVSAHFVLVHTICHGAWLWYKLIPLLQSAGHNVTAIDLVASGIDPRQLEQIGTWEQYSEPLFTLIESIPEGEKVILVGESGGGINIALAAEKYPEKVSALVFHNALMPDIDHSPAFVYKKFSEVFTDWKDSIFSNYTYGNDTVTAVELGDRTLAENIFSNSPIEDVELAKHLVRPGSFFEQDLDTLPNFTSEGYGSVRRVYVYGEEDQIFSRDFQLWQINNYKPDKVYCIPSADHKIQISKVNELAQILQEVANSASDLLAVA

SEQ ID NO: 65 - DNA, 789 bp, synthetic construct
  misc_feature 1..789: note = Round 1 (Activity)
  source 1..789: mol_type = other DNA
atggttagtgcgcattttattctgatccacaccatttgccatggcgcctggtgttggtataaactgatcccgttattacagtctgcaggtcataacgctacggcgattgatcttgtggctagcgggatcgaccctcgccaactggaacagattggcacatgggagcagtactcagaaccattgttcaccctgatcgaatcgctgccggaaggtgagaaagtcattctggtaggagaatccggtggcggcatcaatattgcactggccgcggagaaatatccggagaaagttagcgccctcgtctttcacaacgcacttatgcccgatatcgatcacagtccagcgttcgtgtacaagaaatttagcgaagttttcactgactggaaagattcgatcttcagcaattatacctacggtaacgacacggttaccgcggtggaattgggagatcgtactctggccgagaacatctactccaattctccgattgaagatgtagaactggcgaaacatctggtccgcccaggctccttctttgagcaagacttggataccctgccgaactttacgtcggaagggtatggttcaattcgtcgtgtgtatgtctacggcgaagaagaccagatctttagccgcgattttcagttatggcaaattaataattataagcctgataaagtgtactgtgtaccgagtgctgaccacaagcctcagtttagcaaagtcaacgagctggcccagattctccaagaagttgcaaactctgcgagtgatcttcttgcagtggct

SEQ ID NO: 66 - protein, 263 aa, synthetic construct
  REGION 1..263: note = Round 1 (Activity)
MVSAHFILIHTICHGAWCWYKLIPLLQSAGHNATAIDLVASGIDPRQLEQIGTWEQYSEPLFTLIESLPEGEKVILVGESGGGINIALAAEKYPEKVSALVFHNALMPDIDHSPAFVYKKFSEVFTDWKDSIFSNYTYGNDTVTAVELGDRTLAENIYSNSPIEDVELAKHLVRPGSFFEQDLDTLPNFTSEGYGSIRRVYVYGEEDQIFSRDFQLWQINNYKPDKVYCVPSADHKPQFSKVNELAQILQEVANSASDLLAVA

SEQ ID NO: 67 - DNA, 789 bp, synthetic construct
  misc_feature 1..789: note = Round 1 (Activity)
  source 1..789: mol_type = other DNA
atggttagtgcgcattttattctgatccacaccatttgccatggcgcctggctctggtataaactgatcccgttattacagtctgcaggtcataacgccacggcgattgatcttgtggctagcgggatcgaccctcgccaactggaacagattggcacatgggagcagtactcagaaccattgttcaccctgatcgaatcgctgccggaaggtgagaaagtcattctggtaggagaatccggtggcggcatcaatattgcactggccgcggagaaatatccggagaaagttagcgccctcgtctttcacaacgcacttatgcccgatatcgatcacagtccagcgttcgtgtacaagaaatttagcgaagttttcactgactggaaagattcgatcttcagcaattatacctacggtaacgacacggttaccgcggtggaattgggagatcgtactctggccgagaacatcttctccaattctccgattgaagatgtagaactggcgaaacatctggtccgcaaaggctccttctttgagcaagacttggataccctgccgaactttacgtcggaagggtatggttcagttcgtcgtgtgtatgtctacggcgaagaagaccagatctttagccgcgattttcagttatggcaaattaataattataagcctgataaagtgtactgtgtaccgagtgctgaccacaagattcagatcagcaaagtcaacgagctggcccagattctccaagaagttgcaaactctgcgagtgatcttcttgcagtggct

SEQ ID NO: 68 - protein, 263 aa, synthetic construct
  REGION 1..263: note = Round 1 (Activity)
MVSAHFILIHTICHGAWLWYKLIPLLQSAGHNATAIDLVASGIDPRQLEQIGTWEQYSEPLFTLIESLPEGEKVILVGESGGGINIALAAEKYPEKVSALVFHNALMPDIDHSPAFVYKKFSEVFTDWKDSIFSNYTYGNDTVTAVELGDRTLAENIFSNSPIEDVELAKHLVRKGSFFEQDLDTLPNFTSEGYGSVRRVYVYGEEDQIFSRDFQLWQINNYKPDKVYCVPSADHKIQISKVNELAQILQEVANSASDLLAVA

SEQ ID NO: 69 - DNA, 789 bp, synthetic construct
  misc_feature 1..789: note = Round 1 (Activity)
  source 1..789: mol_type = other DNA
atggttagtgcgcattttattctgatccacaccatttgccatggcgcctggtgttggtataaactgatcccgttattacagtctgcaggtcataacgtcacggcgattgatcttgtggctagcgggatcgaccctcgccaactggaacagattggcacatgggagcagtactcagaaccattgttcaccctgatcgaatcgctgccggaaggtaagaaagtcattctggtaggagaatccggtggcggcatcaatattgcactggccgcggagaaatatccggagaaaattagcgccctcgtctttcacaacgcacttatgcccgatatcgatcacagtccagcgttcgtgtacaagaaatttagcgaagttttcactgactggaaagattcgatcttcagcaattatacctacggtaacgacacggttaccgcggtggaattgggagatcgtactctggccgagaacatctactccaattctccgattgaagatgtagaactggcgaaacatctggtccgcccaggctccttctttgagcaagacttggataccctgccgaactttacgtcggaagggtatggttcaattcgtcgtgtgtatgtttacggcgaagaagaccagatctttagccgcgattttcagttatggcaaattaataattataaacctgataaagtgtactgtgtaccgagtgctgaccacaagatccagtttagcaaagtcaacgagctggcccagattctccaagaagttgcaaactctgcgagtgatcttcttgcagtggct

SEQ ID NO: 70 - protein, 263 aa, synthetic construct
  REGION 1..263: note = Round 1 (Activity)
MVSAHFILIHTICHGAWCWYKLIPLLQSAGHNVTAIDLVASGIDPRQLEQIGTWEQYSEPLFTLIESLPEGKKVILVGESGGGINIALAAEKYPEKISALVFHNALMPDIDHSPAFVYKKFSEVFTDWKDSIFSNYTYGNDTVTAVELGDRTLAENIYSNSPIEDVELAKHLVRPGSFFEQDLDTLPNFTSEGYGSIRRVYVYGEEDQIFSRDFQLWQINNYKPDKVYCVPSADHKIQFSKVNELAQILQEVANSASDLLAVA

SEQ ID NO: 71 - DNA, 789 bp, synthetic construct
  misc_feature 1..789: note = Round 1 (Activity)
  source 1..789: mol_type = other DNA
atggttagtgcgcattttattctgatccacaccatttgccatggcgcctggctgtggtataaactgatcccgttattacagtctgcaggtcataacgctacggcgattgatcttgtggctagcgggatcgaccctcgccaactggaacagattggcacatgggagcagtactcagaaccattgttcaccctgatcgaatcgctgccggaaggtgagaaagtcattctggtaggagaatccggtggcggcatcaatattgcactggccgcggagaaatatccggagaaagttagcgccctcgtctttcacaacgcacttatgcccgatatcgatcacagtccagcgttcgtgtacaagaaatttagcgaagttttcactgactggaaagattcgatcttcagcaattatacctacggtaacgacacggttaccgcggtggaattgggagatcgtactctggccgagaacatcttctccaattctccgattgaagatgtagaactggcgaaacatctggtccgcaagggctccttctttgagcaagacttggataccctgccgaactttacgtcggaagggtatggttcaattcgtcgtgtgtatgtttacggcgaagaagaccagatctttagccgcgattttcagttatggcaaattaataattataagcctgataaagtgtactgtgtaccgagtgctgaccacaagattcagatcagcaaagtcaacgagctggcccagattctccaagaagttgcaaactctgcgagtgatcttcttgcagtggct

SEQ ID NO: 72 - protein, 263 aa, synthetic construct
  REGION 1..263: note = Round 1 (Activity)
MVSAHFILIHTICHGAWLWYKLIPLLQSAGHNATAIDLVASGIDPRQLEQIGTWEQYSEPLFTLIESLPEGEKVILVGESGGGINIALAAEKYPEKVSALVFHNALMPDIDHSPAFVYKKFSEVFTDWKDSIFSNYTYGNDTVTAVELGDRTLAENIFSNSPIEDVELAKHLVRKGSFFEQDLDTLPNFTSEGYGSIRRVYVYGEEDQIFSRDFQLWQINNYKPDKVYCVPSADHKIQISKVNELAQILQEVANSASDLLAVA

SEQ ID NO: 73 - DNA, 789 bp, synthetic construct
  misc_feature 1..789: note = Round 1 (Activity)
  source 1..789: mol_type = other DNA
atggttagtgcgcattttgttctggttcacacgatttgccatggcgcctggctctggtataaactgatcccgttattacagtctgcaggtcataacgctacggcgattgatcttgtggctagcgggatcgaccctcgccaactggaacagattggcacatgggagcagtactcagaaccattgttcaccctgatcgaatcgattccggaaggtaagaaagtcattctggtaggagaatccggtggcggcatcaatattgcactggccgcggagaaatatccggagaaagtgagcgccctcgtctttcacaacgcacttatgcccgatatcgatcacagtccagcgttcgtgtacaagaaatttagcgaagttttcactgactggaaagattcgatcttcagcaattatacctacggtaacgacacggttaccgcggtggaattgggagatcgtactctggccgagaacatcttctccaattctccgattgaagatgtagaactggcgaaacatctggtccgcaagggctccttctttgagcaagacttggataccctgccgaactttacgtcggaagggtatggttcaattcgtcgtgtgtatgtctacggcgaagaagaccagatctttagccgcgattttcagttatggcaaattaataattataagcctgataaagtgtactgtgtaccgagtgctgaccacaagattcagatcagcaaagtcaacgagctggcccagattctccaagaagttgcaaactctgcgagtgatcttcttgcagtggct

SEQ ID NO: 74 - protein, 263 aa, synthetic construct
  REGION 1..263: note = Round 1 (Activity)
MVSAHFVLVHTICHGAWLWYKLIPLLQSAGHNATAIDLVASGIDPRQLEQIGTWEQYSEPLFTLIESIPEGKKVILVGESGGGINIALAAEKYPEKVSALVFHNALMPDIDHSPAFVYKKFSEVFTDWKDSIFSNYTYGNDTVTAVELGDRTLAENIFSNSPIEDVELAKHLVRKGSFFEQDLDTLPNFTSEGYGSIRRVYVYGEEDQIFSRDFQLWQINNYKPDKVYCVPSADHKIQISKVNELAQILQEVANSASDLLAVA

SEQ ID NO: 75 - DNA, 789 bp, synthetic construct
  misc_feature 1..789: note = Round 1 (Activity)
  source 1..789: mol_type = other DNA
atggttagtgcgcattttgttctggttcacacgatttgccatggcgcctggctctggtataaactgatcccgttattacagtctgcaggtcataacgtcacggcgattgatcttgtggctagcgggatcgaccctcgccaactggaacagattggcacatgggagcagtactcagaaccattgttcaccctgatcgaatcgattccggaaggtgagaaagtcattctggtaggagaatccggtggcggcatcaatattgcactggccgcggagaaatatccggagaaagtgagcgccctcgtctttcacaacgcacttatgcccgatatcgatcacagtccagcgttcgtgtacaagaaatttagcgaagttttcactgactggaaagattcgatcttcagcaattatacctacggtaacgacacggttaccgcggtggaattgggagatcgtactctggccgagaacatcttctccaattctccgattgaagatgtagaactggcgaaacatctggtccgcaagggctccttctttgagcaagacttggataccctgccgaactttacgtcggaagggtatggttcaattcgtcgtgtgtatgtttacggcgaagaagaccagatctttagccgcgattttcagttatggcaaattaataattataagcctgataaagtgtactgtatcccgagtgctgaccacaagattcagatcagcaaagtcaacgagctggcccagattctccaagaagttgcaaactctgcgagtgatcttcttgcagtggct

SEQ ID NO: 76 - protein, 263 aa, synthetic construct
  REGION 1..263: note = Round 1 (Activity)
MVSAHFVLVHTICHGAWLWYKLIPLLQSAGHNVTAIDLVASGIDPRQLEQIGTWEQYSEPLFTLIESIPEGEKVILVGESGGGINIALAAEKYPEKVSALVFHNALMPDIDHSPAFVYKKFSEVFTDWKDSIFSNYTYGNDTVTAVELGDRTLAENIFSNSPIEDVELAKHLVRKGSFFEQDLDTLPNFTSEGYGSIRRVYVYGEEDQIFSRDFQLWQINNYKPDKVYCIPSADHKIQISKVNELAQILQEVANSASDLLAVA

SEQ ID NO: 77 - DNA, 789 bp, synthetic construct
  misc_feature 1..789: note = Round 1 (Activity)
  source 1..789: mol_type = other DNA
atggttagtgcgcattttattctgatccacaccatttgccatggcgcctggatttggtataaactgatcccgttattacagtctgcaggtcataacgctacggcgattgatcttgtggctagcgggatcgaccctcgccaactggaacagattggcacatgggagcagtactcagaaccattgttcaccctgatcgaatcgattccggaaggtaagaaagtcattctggtaggagaatccggtggcggcatcaatattgcactggccgcggagaaatatccggagaaagtgagcgccctcgtctttcacaacgcacttatgcccgatatcgatcacagtccagcgttcgtgtacaagaaatttagcgaagttttcactgactggaaagattcgatcttcagcaattatacctacggtaacgacacggttaccgcggtggaattgggagatcgtactctggccgagaacatcttctccaattctccgattgaagatgtagaactggcgaaacatctggtccgcaaaggctccttctttgagcaagacttggataccctgccgaactttacgtcggaagggtatggttcaattcgtcgtgtgtatgtttacggcgaagaagaccagatctttagccgcgattttcagttatggcaaattaataattataagcctgataaagtgtactgtgtaccgagtgctgaccacaagattcagatcagcaaagtcaacgagctggcccagattctccaagaagttgcaaactctgcgagtgatcttcttgcagtggct

SEQ ID NO: 78 - protein, 263 aa, synthetic construct
  REGION 1..263: note = Round 1 (Activity)
MVSAHFILIHTICHGAWIWYKLIPLLQSAGHNATAIDLVASGIDPRQLEQIGTWEQYSEPLFTLIESIPEGKKVILVGESGGGINIALAAEKYPEKVSALVFHNALMPDIDHSPAFVYKKFSEVFTDWKDSIFSNYTYGNDTVTAVELGDRTLAENIFSNSPIEDVELAKHLVRKGSFFEQDLDTLPNFTSEGYGSIRRVYVYGEEDQIFSRDFQLWQINNYKPDKVYCVPSADHKIQISKVNELAQILQEVANSASDLLAVA

SEQ ID NO: 79 - DNA, 789 bp, synthetic construct
  misc_feature 1..789: note = Round 1 (Activity)
  source 1..789: mol_type = other DNA
atggttagtgcgcattttattctgatccacaccatttgccatggcgcctggtgttggtataaactgatcccgttattacagtctgcaggtcataacgctacggcgattgatcttgtggctagcgggatcgaccctcgccaactggaacagattggcacatgggagcagtactcagaaccattgttcaccctgatcgaatcgattccggaaggtgagaaagtcattctggtaggagaatccggtggcggcatcaatattgcactggccgcggagaaatatccggagaaagtgagcgccctcgtctttcacaacgcacttatgcccgatatcgatcacagtccagcgttcgtgtacaagaaatttagcgaagttttcactgactggaaagattcgatcttcagcaattatacctacggtaacgacacggttaccgcggtggaattgggagatcgtactctggccgagaacatcttctccaattctccgattgaagatgtagaactggcgaaacatctggtccgcaaaggctccttctttgagcaagacttggataccctgccgaactttacgtcggaagggtatggttcaattcgtcgtgtgtatgtttacggcgaagaagaccagatctttagccgcgattttcagttatggcaaattaataattataaacctgataaagtgtactgtgtaccgagtgctgaccacaagatccagtttagcaaagtcaacgagctggcccagattctccaagaagttgcaaactctgcgagtgatcttcttgcagtggct

SEQ ID NO: 80 - protein, 263 aa, synthetic construct
  REGION 1..263: note = Round 1 (Activity)
MVSAHFILIHTICHGAWCWYKLIPLLQSAGHNATAIDLVASGIDPRQLEQIGTWEQYSEPLFTLIESIPEGEKVILVGESGGGINIALAAEKYPEKVSALVFHNALMPDIDHSPAFVYKKFSEVFTDWKDSIFSNYTYGNDTVTAVELGDRTLAENIFSNSPIEDVELAKHLVRKGSFFEQDLDTLPNFTSEGYGSIRRVYVYGEEDQIFSRDFQLWQINNYKPDKVYCVPSADHKIQFSKVNELAQILQEVANSASDLLAVA

SEQ ID NO: 81 - DNA, 789 bp, synthetic construct
  misc_feature 1..789: note = Round 1 (Activity)
  source 1..789: mol_type = other DNA
atggttagtgcgcattttattctgatccacaccatttgccatggcgcctggctctggtataaactgatcccgttattacagtctgcaggtcataacgctacggcgattgatcttgtggctagcgggatcgaccctcgccaactggaacagattggcacatgggagcagtactcagaaccattgttcaccctgatcgaatcgctgccggaaggtaagaaagtcattctggtaggagaatccggtggcggcatcaatattgcactggccgcggagaaatatccggagaaaattagcgccctcgtctttcacaacgcacttatgcccgatatcgatcacagtccagcgttcgtgtacaagaaatttagcgaagttttcactgactggaaagattcgatcttcagcaattatacctacggtaacgacacggttaccgcggtggaattgggagatcgtactctggccgagaacatcttctccaattctccgattgaagatgtagaactggcgaaacatctggtccgcccaggctccttctttgagcaagacttggataccctgccgaactttacgtcggaagggtatggttcaattcgtcgtgtgtatgtctacggcgaagaagaccagatctttagccgcgattttcagttatggcaaattaataattataagcctgataaagtgtactgtgtcccgagtgctgaccacaagattcagatcagcaaagtcaacgagctggcccagattctccaagaagttgcaaactctgcgagtgatcttcttgcagtggct

SEQ ID NO: 82 - protein, 263 aa, synthetic construct
  REGION 1..263: note = Round 1 (Activity)
MVSAHFILIHTICHGAWLWYKLIPLLQSAGHNATAIDLVASGIDPRQLEQIGTWEQYSEPLFTLIESLPEGKKVILVGESGGGINIALAAEKYPEKISALVFHNALMPDIDHSPAFVYKKFSEVFTDWKDSIFSNYTYGNDTVTAVELGDRTLAENIFSNSPIEDVELAKHLVRPGSFFEQDLDTLPNFTSEGYGSIRRVYVYGEEDQIFSRDFQLWQINNYKPDKVYCVPSADHKIQISKVNELAQILQEVANSASDLLAVA

SEQ ID NO: 83 - DNA, 789 bp, synthetic construct
  misc_feature 1..789: note = Round 1 (Activity)
  source 1..789: mol_type = other DNA
atggttagtgcgcattttattctgatccacaccatttgccatggcgcctggctctggtataaactgatcccgttattacagtctgcaggtcataacgccacggcgattgatcttgtggctagcgggatcgaccctcgccaactggaacagattggcacatgggagcagtactcagaaccattgttcaccctgatcgaatcgattccggaaggtaagaaagtcattctggtaggagaatccggtggcggcatcaatattgcactggccgcggagaaatatccggagaaaattagcgccctcgtctttcacaacgcacttatgcccgatatcgatcacagtccagcgttcgtgtacaagaaatttagcgaagttttcactgactggaaagattcgatcttcagcaattatacctacggtaacgacacggttaccgcggtggaattgggagatcgtactctggccgagaacatcttctccaattctccgattgaagatgtagaactggcgaaacatctggtccgcccaggctccttctttgagcaagacttggataccctgccgaactttacgtcggaagggtatggttcaattcgtcgtgtgtatgtttacggcgaagaagaccagatctttagccgcgattttcagttatggcaaattaataattataagcctgataaagtgtactgtgtaccgagtgctgaccacaagattcagatcagcaaagtcaacgagctggcccagattctccaagaagttgcaaactctgcgagtgatcttcttgcagtggct

SEQ ID NO: 84 - protein, 263 aa, synthetic construct
  REGION 1..263: note = Round 1 (Activity)
MVSAHFILIHTICHGAWLWYKLIPLLQSAGHNATAIDLVASGIDPRQLEQIGTWEQYSEPLFTLIESIPEGKKVILVGESGGGINIALAAEKYPEKISALVFHNALMPDIDHSPAFVYKKFSEVFTDWKDSIFSNYTYGNDTVTAVELGDRTLAENIFSNSPIEDVELAKHLVRPGSFFEQDLDTLPNFTSEGYGSIRRVYVYGEEDQIFSRDFQLWQINNYKPDKVYCVPSADHKIQISKVNELAQILQEVANSASDLLAVA

SEQ ID NO: 85 - DNA, 789 bp, synthetic construct
  misc_feature 1..789: note = Round 1 (Activity)
  source 1..789: mol_type = other DNA
atggttagtgcgcattttgttctggttcacacgatttgccatggcgcctggctctggtataaactgatcccgttattacagtctgcaggtcataacgctacggcgattgatcttgtggctagcgggatcgaccctcgccaactggaacagattggcacatgggagcagtactcagaaccattgttcaccctgatcgaatcgatcccggaaggtaagaaagtcattctggtaggagaatccggtggcggcatcaatattgcactggccgcggagaaatatccggagaaagttagcgccctcgtctttcacaacgcacttatgcccgatatcgatcacagtccagcgttcgtgtacaagaaatttagcgaagttttcactgactggaaagattcgatcttcagcaattatacctacggtaacgacacggttaccgcggtggaattgggagatcgtactctggccgagaacatcttctccaattctccgattgaagatgtagaactggcgaaacatctggtccgcaagggctccttctttgagcaagacttggataccctgccgaactttacgtcggaagggtatggttcagttcgtcgtgtgtatgtctacggcgaagaagaccagatctttagccgcgattttcagttatggcaaattaataattataagcctgataaagtgtactgtgtcccgagtgctgaccacaagattcagatcagcaaagtcaacgagctggcccagattctccaagaagttgcaaactctgcgagtgatcttcttgcagtggct

SEQ ID NO: 86 - protein, 263 aa, synthetic construct
  REGION 1..263: note = Round 1 (Activity)
MVSAHFVLVHTICHGAWLWYKLIPLLQSAGHNATAIDLVASGIDPRQLEQIGTWEQYSEPLFTLIESIPEGKKVILVGESGGGINIALAAEKYPEKVSALVFHNALMPDIDHSPAFVYKKFSEVFTDWKDSIFSNYTYGNDTVTAVELGDRTLAENIFSNSPIEDVELAKHLVRKGSFFEQDLDTLPNFTSEGYGSVRRVYVYGEEDQIFSRDFQLWQINNYKPDKVYCVPSADHKIQISKVNELAQILQEVANSASDLLAVA

SEQ ID NO: 87 - DNA, 789 bp, synthetic construct
  misc_feature 1..789: note = Round 1 (Activity)
  source 1..789: mol_type = other DNA
atggttagtgcgcattttattctggttcacacgatttgccatggcgcctggctctggtataaactgatcccgttattacagtctgcaggtcataacgtcacggcgattgatcttgtggctagcgggatcgaccctcgccaactggaacagattggcacatgggagcagtactcagaaccattgttcaccctgatcgaatcgctgccggaaggtaagaaagtcattctggtaggagaatccggtggcggcatcaatattgcactggccgcggagaaatatccggagaaagtgagcgccctcgtctttcacaacgcacttatgcccgatatcgatcacagtccagcgttcgtgtacaagaaatttagcgaagttttcactgactggaaagattcgatcttcagcaattatacctacggtaacgacacggttaccgcggtggaattgggagatcgtactctggccgagaacatctactccaattctccgattgaagatgtagaactggcgaaacatctggtccgcaaaggctccttctttgagcaagacttggataccctgccgaactttacgtcggaagggtatggttcagttcgtcgtgtgtatgtttacggcgaagaagaccagatctttagccgcgattttcagttatggcaaattaataattataagcctgataaagtgtactgtgtaccgagtgctgaccacaagattcagatcagcaaagtcaacgagctggcccagattctccaagaagttgcaaactctgcgagtgatcttcttgcagtggct

SEQ ID NO: 88 - protein, 263 aa, synthetic construct
  REGION 1..263: note = Round 1 (Activity)
MVSAHFILVHTICHGAWLWYKLIPLLQSAGHNVTAIDLVASGIDPRQLEQIGTWEQYSEPLFTLIESLPEGKKVILVGESGGGINIALAAEKYPEKVSALVFHNALMPDIDHSPAFVYKKFSEVFTDWKDSIFSNYTYGNDTVTAVELGDRTLAENIYSNSPIEDVELAKHLVRKGSFFEQDLDTLPNFTSEGYGSVRRVYVYGEEDQIFSRDFQLWQINNYKPDKVYCVPSADHKIQISKVNELAQILQEVANSASDLLAVA

SEQ ID NO: 89 - DNA, 789 bp, synthetic construct
  misc_feature 1..789: note = Round 1 (Activity)
  source 1..789: mol_type = other DNA
atggttagtgcgcattttattctgatccacaccatttgccatggcgcctggtgttggtataaactgatcccgttattacagtctgcaggtcataacgctacggcgattgatcttgtggctagcgggatcgaccctcgccaactggaacagattggcacatgggagcagtactcagaaccattgttcaccctgatcgaatcgctgccggaaggtaagaaagtcattctggtaggagaatccggtggcggcatcaatattgcactggccgcggagaaatatccggagaaagttagcgccctcgtctttcacaacgcacttatgcccgatatcgatcacagtccagcgttcgtgtacaagaaatttagcgaagttttcactgactggaaagattcgatcttcagcaattatacctacggtaacgacacggttaccgcggtggaattgggagatcgtactctggccgagaacatcttctccaattctccgattgaagatgtagaactggcgaaacatctggtccgcccaggctccttctttgagcaagacttggataccctgccgaactttacgtcggaagggtatggttcaattcgtcgtgtgtatgtctacggcgaagaagaccagatctttagccgcgattttcagttatggcaaattaataattatcctcctgataaagtgtactgtgtaccgagtgctgaccacaagcctcagtttagcaaagtcaacgagctggcccagattctccaagaagttgcaaactctgcgagtgatcttcttgcagtggct

SEQ ID NO: 90 - protein, 263 aa, synthetic construct
  REGION 1..263: note = Round 1 (Activity)
MVSAHFILIHTICHGAWCWYKLIPLLQSAGHNATAIDLVASGIDPRQLEQIGTWEQYSEPLFTLIESLPEGKKVILVGESGGGINIALAAEKYPEKVSALVFHNALMPDIDHSPAFVYKKFSEVFTDWKDSIFSNYTYGNDTVTAVELGDRTLAENIFSNSPIEDVELAKHLVRPGSFFEQDLDTLPNFTSEGYGSIRRVYVYGEEDQIFSRDFQLWQINNYPPDKVYCVPSADHKPQFSKVNELAQILQEVANSASDLLAVA

SEQ ID NO: 91 - DNA, 789 bp, synthetic construct
  misc_feature 1..789: note = Round 1 (Activity)
  source 1..789: mol_type = other DNA
atggttagtgcgcattttattctgatccacaccatttgccatggcgcctggtgttggtataaactgatcccgttattacagtctgcaggtcataacgctacggcgattgatcttgtggctagcgggatcgaccctcgccaactggaacagattggcacatgggagcagtactcagaaccattgttcaccctgatcgaatcgctgccggaaggtgagaaagtcattctggtaggagaatccggtggcggcatcaatattgcactggccgcggagaaatatccggagaaagtgagcgccctcgtctttcacaacgcacttatgcccgatatcgatcacagtccagcgttcgtgtacaagaaatttagcgaagttttcactgactggaaagattcgatcttcagcaattatacctacggtaacgacacggttaccgcggtggaattgggagatcgtactctggccgagaacatcttctccaattctccgattgaagatgtagaactggcgaaacatctggtccgcaaaggctccttctttgagcaagacttggataccctgccgaactttacgtcggaagggtatggttcaattcgtcgtgtgtatgtttacggcgaagaagaccagatctttagccgcgattttcagttatggcaaattaataattataagcctgataaagtgtactgtgtaccgagtgctgaccacaagatccagtttagcaaagtcaacgagctggcccagattctccaagaagttgcaaactctgcgagtgatcttcttgcagtggct

SEQ ID NO: 92 - protein, 263 aa, synthetic construct
  REGION 1..263: note = Round 1 (Activity)
MVSAHFILIHTICHGAWCWYKLIPLLQSAGHNATAIDLVASGIDPRQLEQIGTWEQYSEPLFTLIESLPEGEKVILVGESGGGINIALAAEKYPEKVSALVFHNALMPDIDHSPAFVYKKFSEVFTDWKDSIFSNYTYGNDTVTAVELGDRTLAENIFSNSPIEDVELAKHLVRKGSFFEQDLDTLPNFTSEGYGSIRRVYVYGEEDQIFSRDFQLWQINNYKPDKVYCVPSADHKIQFSKVNELAQILQEVANSASDLLAVA

SEQ ID NO: 93 - DNA, 789 bp, synthetic construct
  misc_feature 1..789: note = Round 1 (Activity)
  source 1..789: mol_type = other DNA
atggttagtgcgcattttattctgatccacaccatttgccatggcgcctggctctggtataaactgatcccgttattacagtctgcaggtcataacgctacggcgattgatcttgcggctagcgggatcgaccctcgccaactggaacagattggcacatgggagcagtactcagaaccattgttcaccctgatcgaatcgattccggaaggtaagaaagtcattctggtaggagaatccggtggcggcatcaatattgcactggccgcggagaaatatccggagaaagtgagcgccctcgtctttcacaacgcacttatgcccgatatcgatcacagtccagcgttcgtgtacaagaaatttagcgaagttttcactgactggaaagattcgatcttcagcaattatacctacggtaacgacacggttaccgcggtggaattgggagatcgtactctggccgagaacatcttctccaattctccgattgaagatgtagaactggcgaaacatctggtccgcaaaggctccttctttgagcaagacttggataccctgccgaactttacgtcggaagggtatggttcaattcgtcgtgtgtatgtttacggcgaagaagaccagatctttagccgcgattttcagttatggcaaattaataattataagcctgataaagtgtactgtgtaccgagtgctgaccacaagattcagatcagcaaagtcaacgagctggcccagattctccaagaagttgcaaactctgcgagtgatcttcttgcagtggct

SEQ ID NO: 94 - protein, 263 aa, synthetic construct
  REGION 1..263: note = Round 1 (Activity)
MVSAHFILIHTICHGAWLWYKLIPLLQSAGHNATAIDLAASGIDPRQLEQIGTWEQYSEPLFTLIESIPEGKKVILVGESGGGINIALAAEKYPEKVSALVFHNALMPDIDHSPAFVYKKFSEVFTDWKDSIFSNYTYGNDTVTAVELGDRTLAENIFSNSPIEDVELAKHLVRKGSFFEQDLDTLPNFTSEGYGSIRRVYVYGEEDQIFSRDFQLWQINNYKPDKVYCVPSADHKIQISKVNELAQILQEVANSASDLLAVA

SEQ ID NO: 95 - DNA, 789 bp, synthetic construct
  misc_feature 1..789: note = Round 1 (Activity)
  source 1..789: mol_type = other DNA
atggttagtgcgcattttattctggttcacgggatttgccatggcgcctggctctggtataaactgatcccgttattacagtctgcaggtcataacgtcacggcgattgatcttgtggctagcgggatcgaccctcgccaactggaacagattggcacatgggagcagtactcagaaccattgttcaccctgatcgaatcgatcccggaaggtgagaaagtcattctggtaggagaatccggtggcggcatcaatattgcactggccgcggagaaatatccggagaaagttagcgccctcgtctttcacaacgcacttatgcccgatatcgatcacagtccagcgttcgtgtacaagaaatttagcgaagttttcactgactggaaagattcgatcttcagcaattatacctacggtaacgacacggttaccgcggtggaattgggagatcgtactctggccgagaacatcttctccaattctccgattgaagatgtagaactggcgaaacatctggtccgcaagggctccttctttgagcaagacttggataccctgccgaactttacgtcggaagggtatggttcagttcgtcgtgtgtatgtttacggcgaagaagaccagatctttagccgcgattttcagttatggcaaattaataattataagcctgataaagtgtactgtatcccgagtgctgaccacaagattcagatcagcaaagtcaacgagctggcccagattctccaagaagttgcaaactctgcgagtgatcttcttgcagtggct

SEQ ID NO: 96 - protein, 263 aa, synthetic construct
  REGION 1..263: note = Round 1 (Activity)
MVSAHFILVHGICHGAWLWYKLIPLLQSAGHNVTAIDLVASGIDPRQLEQIGTWEQYSEPLFTLIESIPEGEKVILVGESGGGINIALAAEKYPEKVSALVFHNALMPDIDHSPAFVYKKFSEVFTDWKDSIFSNYTYGNDTVTAVELGDRTLAENIFSNSPIEDVELAKHLVRKGSFFEQDLDTLPNFTSEGYGSVRRVYVYGEEDQIFSRDFQLWQINNYKPDKVYCIPSADHKIQISKVNELAQILQEVANSASDLLAVA

SEQ ID NO: 97 - DNA, 789 bp, synthetic construct
  misc_feature 1..789: note = Round 1 (Activity)
  source 1..789: mol_type = other DNA
atggttagtgcgcattttattctgatccacaccatttgccatggcgcctggtgttggtataaactgatcccgttattacagtctgcaggtcataacgtcacggcgattgatcttgtggctagcgggatcgaccctcgccaactggaacagattggcacatgggagcagtactcagaaccattgttcaccctgatcgaatcgatcccggaaggtgagaaagtcattctggtaggagaatccggtggcggcatcaatattgcactggccgcggagaaatatccggagaaaattagcgccctcgtctttcacaacgcacttatgcccgatatcgatcacagtccagcgttcgtgtacaagaaatttagcgaagttttcactgactggaaagattcgatcttcagcaattatacctacggtaacgacacggttaccgcggtggaattgggagatcgtactctggccgagaacatctactccaattctccgattgaagatgtagaactggcgaaacatctggtccgcccaggctccttctttgagcaagacttggataccctgccgaactttacgtcggaagggtatggttcaattcgtcgtgtgtatgtttacggcgaagaagaccagatctttagccgcgattttcagttatggcaaattaataattataaacctgataaagtgtactgtgtaccgagtgctgaccacaagatccagattagcaaagtcaacgagctggcccagattctccaagaagttgcaaactctgcgagtgatcttcttgcagtggct

SEQ ID NO: 98 - protein, 263 aa, synthetic construct
  REGION 1..263: note = Round 1 (Activity)
MVSAHFILIHTICHGAWCWYKLIPLLQSAGHNVTAIDLVASGIDPRQLEQIGTWEQYSEPLFTLIESIPEGEKVILVGESGGGINIALAAEKYPEKISALVFHNALMPDIDHSPAFVYKKFSEVFTDWKDSIFSNYTYGNDTVTAVELGDRTLAENIYSNSPIEDVELAKHLVRPGSFFEQDLDTLPNFTSEGYGSIRRVYVYGEEDQIFSRDFQLWQINNYKPDKVYCVPSADHKIQISKVNELAQILQEVANSASDLLAVA

SEQ ID NO: 99 - DNA, 789 bp, synthetic construct
  misc_feature 1..789: note = Round 1 (Activity)
  source 1..789: mol_type = other DNA
atggttagtgcgcattttattctgatccacaccatttgccatggcgcctggctgtggtataaactgatcccgttattacagtctgcaggtcataacgccacggcgattgatcttgtggctagcgggatcgaccctcgccaactggaacagattggcacatgggagcagtactcagaaccattgttcaccctgatcgaatcgatcccggaaggtaagaaagtcattctggtaggagaatccggtggcggcatcaatattgcactggccgcggagaaatatccggagaaaattagcgccctcgtctttcacaacgcacttatgcccgatatcgatcacagtccagcgttcgtgtacaagaaatttagcgaagttttcactgactggaaagattcgatcttcagcaattatacctacggtaacgacacggttaccgcggtggaattgggagatcgtactctggccgagaacatctactccaattctccgattgaagatgtagaactggcgaaacatctggtccgcccaggctccttctttgagcaagacttggataccctgccgaactttacgtcggaagggtatggttcagttcgtcgtgtgtatgtctacggcgaagaagaccagatctttagccgcgattttcagttatggcaaattaataattataagcctgataaagtgtactgtgtaccgagtgctgaccacaagatccagattagcaaagtcaacgagctggcccagattctccaagaagttgcaaactctgcgagtgatcttcttgcagtggct

SEQ ID NO: 100 - protein, 263 aa, synthetic construct
  REGION 1..263: note = Round 1 (Activity)
MVSAHFILIHTICHGAWLWYKLIPLLQSAGHNATAIDLVASGIDPRQLEQIGTWEQYSEPLFTLIESIPEGKKVILVGESGGGINIALAAEKYPEKISALVFHNALMPDIDHSPAFVYKKFSEVFTDWKDSIFSNYTYGNDTVTAVELGDRTLAENIYSNSPIEDVELAKHLVRPGSFFEQDLDTLPNFTSEGYGSVRRVYVYGEEDQIFSRDFQLWQINNYKPDKVYCVPSADHKIQISKVNELAQILQEVANSASDLLAVA

SEQ ID NO: 101 - DNA, 789 bp, synthetic construct
  misc_feature 1..789: note = Round 1 (Activity)
  source 1..789: mol_type = other DNA
atggttagtgcgcattttgttctgattcacacgatttgccatggcgcctggctctggtataaactgatcccgttattacagtctgcaggtcataacgccacggcgattgatcttgtggctagcgggatcgaccctcgccaactggaacagattggcacatgggagcagtactcagaaccattgttcaccctgatcgaatcgatcccggaaggtgagaaagtcattctggtaggagaatccggtggcggcatcaatattgcactggccgcggagaaatatccggagaaagtgagcgccctcgtctttcacaacgcacttatgcccgatatcgatcacagtccagcgttcgtgtacaagaaatttagcgaagttttcactgactggaaagattcgatcttcagcaattatacctacggtaacgacacggttaccgcggtggaattgggagatcgtactctggccgagaacatcttctccaattctccgattgaagatgtagaactggcgaaacatctggtccgcaaaggctccttctttgagcaagacttggataccctgccgaactttacgtcggaagggtatggttcaattcgtcgtgtgtatgtttacggcgaagaagaccagatctttagccgcgattttcagttatggcaaattaataattataagcctgataaagtgtactgtgtcccgagtgctgaccacaagattcagatcagcaaagtcaacgagctggcccagattctccaagaagttgcaaactctgcgagtgatcttcttgcagtggct

SEQ ID NO: 102 - protein, 263 aa, synthetic construct
  REGION 1..263: note = Round 1 (Activity)
MVSAHFVLIHTICHGAWLWYKLIPLLQSAGHNATAIDLVASGIDPRQLEQIGTWEQYSEPLFTLIESIPEGEKVILVGESGGGINIALAAEKYPEKVSALVFHNALMPDIDHSPAFVYKKFSEVFTDWKDSIFSNYTYGNDTVTAVELGDRTLAENIFSNSPIEDVELAKHLVRKGSFFEQDLDTLPNFTSEGYGSIRRVYVYGEEDQIFSRDFQLWQINNYKPDKVYCVPSADHKIQISKVNELAQILQEVANSASDLLAVA

SEQ ID NO: 103 - DNA, 789 bp, synthetic construct
  misc_feature 1..789: note = Round 1 (Activity)
  source 1..789: mol_type = other DNA
atggttagtgcgcattttgttctggttcacacgatttgccatggcgcctggctctggtataaactgatcccgttattacagtctgcaggtcataacgtcacggcgattgatcttgtggctagcgggatcgaccctcgccaactggaacagattggcacatgggagcagtactcagaaccattgttcaccctgatcgaatcgctgccggaaggtgagaaagtcattctggtaggagaatccggtggcggcatcaatattgcactggccgcggagaaatatccggagaaagtgagcgccctcgtctttcacaacgcacttatgcccgatatcgatcacagtccagcgttcgtgtacaagaaatttagcgaagttttcactgactggaaagattcgatcttcagcaattatacctacggtaacgacacggttaccgcggtggaattgggagatcgtactctggccgagaacatctactccaattctccgattgaagatgtagaactggcgaaacatctggtccgcaaaggctccttctttgagcaagacttggataccctgccgaactttacgtcggaagggtatggttcaattcgtcgtgtgtatgtttacggcgaagaagaccagatctttagccgcgattttcagttatggcaaattaataattataagcctgataaagtgtactgtgtaccgagtgctgaccacaagatccagattagcaaagtcaacgagctggcccagattctccaagaagttgcaaactctgcgagtgatcttcttgcagtggct

SEQ ID NO: 104 - protein, 263 aa, synthetic construct
  REGION 1..263: note = Round 1 (Activity)
MVSAHFVLVHTICHGAWLWYKLIPLLQSAGHNVTAIDLVASGIDPRQLEQIGTWEQYSEPLFTLIESLPEGEKVILVGESGGGINIALAAEKYPEKVSALVFHNALMPDIDHSPAFVYKKFSEVFTDWKDSIFSNYTYGNDTVTAVELGDRTLAENIYSNSPIEDVELAKHLVRKGSFFEQDLDTLPNFTSEGYGSIRRVYVYGEEDQIFSRDFQLWQINNYKPDKVYCVPSADHKIQISKVNELAQILQEVANSASDLLAVA

SEQ ID NO: 105 - DNA, 789 bp, synthetic construct
  misc_feature 1..789: note = Round 1 (Activity)
  source 1..789: mol_type = other DNA
atggttagtgcgcattttattctgatccacaccatttgccatggcgcctggtgttggtataaactgatcccgttattacagtctgcaggtcataacgctacggcgattgatcttgtggctagcgggatcgaccctcgccaactggaacagattggcacatgggagcagtactcagaaccattgttcaccctgatcgaatcgatcccggaaggtaagaaagtcattctggtaggagaatccggtggcggcatcaatattgcactggccgcggagaaatatccggagaaagttagcgccctcgtctttcacaacgcacttatgcccgatatcgatcacagtccagcgttcgtgtacaagaaatttagcgaagttttcactgactggaaagattcgatcttcagcaattatacctacggtaacgacacggttaccgcggtggaattgggagatcgtactctggccgagaacatcttctccaattctccgattgaagatgtagaactggcgaaacatctggtccgcaagggctccttctttgagcaagacttggataccctgccgaactttacgtcggaagggtatggttcagttcgtcgtgtgtatgtttacggcgaagaagaccagatctttagccgcgattttcagttatggcaaattaataattataagcctgataaagtgtactgtgtaccgagtgctgaccacaagatccagtttagcaaagtcaacgagctggcccagattctccaagaagttgcaaactctgcgagtgatcttcttgcagtggct

SEQ ID NO: 106 - protein, 263 aa, synthetic construct
  REGION 1..263: note = Round 1 (Activity)
MVSAHFILIHTICHGAWCWYKLIPLLQSAGHNATAIDLVASGIDPRQLEQIGTWEQYSEPLFTLIESIPEGKKVILVGESGGGINIALAAEKYPEKVSALVFHNALMPDIDHSPAFVYKKFSEVFTDWKDSIFSNYTYGNDTVTAVELGDRTLAENIFSNSPIEDVELAKHLVRKGSFFEQDLDTLPNFTSEGYGSVRRVYVYGEEDQIFSRDFQLWQINNYKPDKVYCVPSADHKIQFSKVNELAQILQEVANSASDLLAVA

SEQ ID NO: 107 - DNA, 789 bp, synthetic construct
  misc_feature 1..789: note = Round 1 (Activity)
  source 1..789: mol_type = other DNA
atggttagtgcgcattttattctgatccacaccatttgccatggcgcctggtgttggtataaactgatcccgttattacagtctgcaggtcataacgctacggcgattgatcttgtggctagcgggatcgaccctcgccaactggaacagattggcacatgggagcagtactcagaaccattgttcaccctgatcgaatcgctgccggaaggtgagaaagtcattctggtaggagaatccggtggcggcatcaatattgcactggccgcggagaaatatccggagaaagttagcgccctcgtctttcacaacgcacttatgcccgatatcgatcacagtccagcgttcgtgtacaagaaatttagcgaagttttcactgactggaaagattcgatcttcagcaattatacctacggtaacgacacggttaccgcggtggaattgggagatcgtactctggccgagaacatcttctccaattctccgattgaagatgtagaactggcgaaacatctggtccgcaaaggctccttctttgagcaagacttggataccctgccgaactttacgtcggaagggtatggttcaattcgtcgtgtgtatgtttacggcgaagaagaccagatctttagccgcgattttcagttatggcaaattaataattataaacctgataaagtgtactgtgtaccgagtgctgaccacaagatccagattagcaaagtcaacgagctggcccagattctccaagaagttgcaaactctgcgagtgatcttcttgcagtggct

SEQ ID NO: 108 - protein, 263 aa, synthetic construct
  REGION 1..263: note = Round 1 (Activity)
MVSAHFILIHTICHGAWCWYKLIPLLQSAGHNATAIDLVASGIDPRQLEQIGTWEQYSEPLFTLIESLPEGEKVILVGESGGGINIALAAEKYPEKVSALVFHNALMPDIDHSPAFVYKKFSEVFTDWKDSIFSNYTYGNDTVTAVELGDRTLAENIFSNSPIEDVELAKHLVRKGSFFEQDLDTLPNFTSEGYGSIRRVYVYGEEDQIFSRDFQLWQINNYKPDKVYCVPSADHKIQISKVNELAQILQEVANSASDLLAVA

SEQ ID NO: 109 - DNA, 789 bp, synthetic construct
  misc_feature 1..789: note = Round 1 (Activity)
  source 1..789: mol_type = other DNA
atggttagtgcgcattttattctggttcacacgatttgccatggcgcctggctctggtataaactgatcccgttattacagtctgcaggtcataacgccacggcgattgatcttgtggctagcgggatcgaccctcgccaactggaacagattggcacatgggagcagtactcagaaccattgttcaccctgatcgaatcgatcccggaaggtaagaaagtcattctggtaggagaatccggtggcggcatcaatattgcactggccgcggagaaatatccggagaaaattagcgccctcgtctttcacaacgcacttatgcccgatatcgatcacagtccagcgttcgtgtacaagaaatttagcgaagttttcactgactggaaagattcgatcttcagcaattatacctacggtaacgacacggttaccgcggtggaattgggagatcgtactctggccgagaacatcttctccaattctccgattgaagatgtagaactggcgaaacatctggtccgcccaggctccttctttgagcaagacttggataccctgccgaactttacgtcggaagggtatggttcaattcgtcgtgtgtatatctacggcgaagaagaccagatctttagccgcgattttcagttatggatgattaataattataagcctgataaagtgtactgtgtaccgagtgctgaccacaagatccagattagcaaagtcaacgagctggcccagattctccaagaagttgcaaactctgcgagtgatcttcttgcagtggct

SEQ ID NO: 110 - protein, 263 aa, synthetic construct
  REGION 1..263: note = Round 1 (Activity)
MVSAHFILVHTICHGAWLWYKLIPLLQSAGHNATAIDLVASGIDPRQLEQIGTWEQYSEPLFTLIESIPEGKKVILVGESGGGINIALAAEKYPEKISALVFHNALMPDIDHSPAFVYKKFSEVFTDWKDSIFSNYTYGNDTVTAVELGDRTLAENIFSNSPIEDVELAKHLVRPGSFFEQDLDTLPNFTSEGYGSIRRVYIYGEEDQIFSRDFQLWMINNYKPDKVYCVPSADHKIQISKVNELAQILQEVANSASDLLAVA

SEQ ID NO: 111 - DNA, 789 bp, synthetic construct
  misc_feature 1..789: note = Round 1 (Activity)
  source 1..789: mol_type = other DNA
atggttagtgcgcattttattctgattcacacgatttgccatggcgcctggctctggtataaactgatcccgttattacagtctgcaggtcataacgtcacggcgattgatcttgtggctagcgggatcgaccctcgccaactggaacagattggcacatgggagcagtactcagaaccattgttcaccctgatcgaatcgatcccggaaggtaagaaagtcattctggtaggagaatccggtggcggcatcaatattgcactggccgcggagaaatatccggagaaagttagcgccctcgtctttcacaacgcacttatgcccgatatcgatcacagtccagcgttcgtgtacaagaaatttagcgaagttttcactgactggaaagattcgatcttcagcaattatacctacggtaacgacacggttaccgcggtggaattgggagatcgtactctggccgagaacatcttctccaattctccgattgaagatgtagaactggcgaaacatctggtccgcccaggctccttctttgagcaagacttggataccctgccgaactttacgtcggaagggtatggttcaattcgtcgtgtgtatgtttacggcgaagaagaccagatctttagccgcgattttcagttatggcaaattaataattataagcctgataaagtgtactgtgtcccgagtgctgaccacaagattcagatcagcaaagtcaacgagctggcccagattctccaagaagttgcaaactctgcgagtgatcttcttgcagtggct

SEQ ID NO: 112 - protein, 263 aa, synthetic construct
  REGION 1..263: note = Round 1 (Activity)
MVSAHFILIHTICHGAWLWYKLIPLLQSAGHNVTAIDLVASGIDPRQLEQIGTWEQYSEPLFTLIESIPEGKKVILVGESGGGINIALAAEKYPEKVSALVFHNALMPDIDHSPAFVYKKFSEVFTDWKDSIFSNYTYGNDTVTAVELGDRTLAENIFSNSPIEDVELAKHLVRPGSFFEQDLDTLPNFTSEGYGSIRRVYVYGEEDQIFSRDFQLWQINNYKPDKVYCVPSADHKIQISKVNELAQILQEVANSASDLLAVA

SEQ ID NO: 113 - DNA, 789 bp, synthetic construct
  misc_feature 1..789: note = Round 1 (Activity)
  source 1..789: mol_type = other DNA
atggttagtgcgcattttattctgatccacaccatttgccatggcgcctggctgtggtataaactgatcccgttattacagtctgcaggtcataacgccacggcgattgatcttgtggctagcgggatcgaccctcgccaactggaacagattggcacatgggagcagtactcagaaccattgttcaccctgatcgaatcgctgccggaaggtgagaaagtcattctggtaggagaatccggtggcggcatcaatattgcactggccgcggagaaatatccggagaaagttagcgccctcgtctttcacaacgcacttatgcccgatatcgatcacagtccagcgttcgtgtacaagaaatttagcgaagttttcactgactggaaagattcgatcttcagcaattatacctacggtaacgacacggttaccgcggtggaattgggagatcgtactctggccgagaacatcttctccaattctccgattgaagatgtagaactggcgaaacatctggtccgcaagggctccttctttgagcaagacttggataccctgccgaactttacgtcggaagggtatggttcagttcgtcgtgtgtatgtctacggcgaagaagaccagatctttagccgcgattttcagttatggcaaattaataattataagcctgataaagtgtactgtgtaccgagtgctgaccacaagatccagtttagcaaagtcaacgagctggcccagattctccaagaagttgcaaactctgcgagtgatcttcttgcagtggct

SEQ ID NO: 114 - protein, 263 aa, synthetic construct
  REGION 1..263: note = Round 1 (Activity)
MVSAHFILIHTICHGAWLWYKLIPLLQSAGHNATAIDLVASGIDPRQLEQIGTWEQYSEPLFTLIESLPEGEKVILVGESGGGINIALAAEKYPEKVSALVFHNALMPDIDHSPAFVYKKFSEVFTDWKDSIFSNYTYGNDTVTAVELGDRTLAENIFSNSPIEDVELAKHLVRKGSFFEQDLDTLPNFTSEGYGSVRRVYVYGEEDQIFSRDFQLWQINNYKPDKVYCVPSADHKIQFSKVNELAQILQEVANSASDLLAVA

SEQ ID NO: 115 - DNA, 789 bp, synthetic construct
  misc_feature 1..789: note = Round 1 (Activity)
  source 1..789: mol_type = other DNA
atggttagtgcgcattttattctgatccacaccatttgccatggcgcctggctctggtataaactgatcccgttattacagtctgcaggtcataacgtcacggcgattgatcttgtggctagcgggatcgaccctcgccaactggaacagattggcacatgggagcagtactcagaaccattgttcaccctgatcgaatcgatcccggaaggtgagaaagtcattctggtaggagaatccggtggcggcatcaatattgcactggccgcggagaaatatccggagaaagttagcgccctcgtctttcacaacgcacttatgcccgatatcgatcacagtccagcgttcgtgtacaagaaatttagcgaagttttcactgactggaaagattcgatcttcagcaattatacctacggtaacgacacggttaccgcggtggaattgggagatcgtactctggccgagaacatcttctccaattctccgattgaagatgtagaactggcgaaacatctggtccgcaagggctccttctttgagcaagacttggataccctgccgaactttacgtcggaagggtatggttcaattcgtcgtgtgtatgtttacggcgaagaagaccagatctttagccgcgattttcagttatggcaaattaataattataagcctgataaagtgtactgtgtcccgagtgctgaccacaagattcagatcagcaaagtcaacgagctggcccagattctccaagaagttgcaaactctgcgagtgatcttcttgcagtggct

SEQ ID NO: 116 - protein, 263 aa, synthetic construct
  REGION 1..263: note = Round 1 (Activity)
MVSAHFILIHTICHGAWLWYKLIPLLQSAGHNVTAIDLVASGIDPRQLEQIGTWEQYSEPLFTLIESIPEGEKVILVGESGGGINIALAAEKYPEKVSALVFHNALMPDIDHSPAFVYKKFSEVFTDWKDSIFSNYTYGNDTVTAVELGDRTLAENIFSNSPIEDVELAKHLVRKGSFFEQDLDTLPNFTSEGYGSIRRVYVYGEEDQIFSRDFQLWQINNYKPDKVYCVPSADHKIQISKVNELAQILQEVANSASDLLAVA

SEQ ID NO: 117 - DNA, 789 bp, synthetic construct
  misc_feature 1..789: note = Round 1 (Activity)
  source 1..789: mol_type = other DNA
atggttagtgcgcattttattctgatccacaccatttgccatggcgcctggtgttggtataaactgatcccgttattacagtctgcaggtcataacgctacggcgattgatcttgtggctagcgggatcgaccctcgccaactggaacagattggcacatgggagcagtactcagaaccattgttcaccctgatcgaatcgatcccggaaggtgagaaagtcattctggtaggagaatccggtggcggcatcaatattgcactggccgcggagaaatatccggagaaagtgagcgccctcgtctttcacaacgcacttatgcccgatatcgatcacagtccagcgttcgtgtacaagaaatttagcgaagttttcactgactggaaagattcgatcttcagcaattatacctacggtaacgacacggttaccgcggtggaattgggagatcgtactctggccgagaacatcttctccaattctccgattgaagatgtagaactggcgaaacatctggtccgcaagggctccttctttgagcaagacttggataccctgccgaactttacgtcggaagggtatggttcaattcgtcgtgtgtatgtttacggcgaagaagaccagatctttagccgcgattttcagttatggcaaattaataattataagcctgataaagtgtactgtgtaccgagtgctgaccacaagcctcagattagcaaagtcaacgagctggcccagattctccaagaagttgcaaactctgcgagtgatcttcttgcagtggct

SEQ ID NO: 118 - protein, 263 aa, synthetic construct
  REGION 1..263: note = Round 1 (Activity)
MVSAHFILIHTICHGAWCWYKLIPLLQSAGHNATAIDLVASGIDPRQLEQIGTWEQYSEPLFTLIESIPEGEKVILVGESGGGINIALAAEKYPEKVSALVFHNALMPDIDHSPAFVYKKFSEVFTDWKDSIFSNYTYGNDTVTAVELGDRTLAENIFSNSPIEDVELAKHLVRKGSFFEQDLDTLPNFTSEGYGSIRRVYVYGEEDQIFSRDFQLWQINNYKPDKVYCVPSADHKPQISKVNELAQILQEVANSASDLLAVA

SEQ ID NO: 119 - DNA, 789 bp, synthetic construct
  misc_feature 1..789: note = Round 1 (Activity)
  source 1..789: mol_type = other DNA
atggttagtgcgcattttattctgatccacaccatttgccatggcgcctggctctggtataaactgatcccgttattacagtctgcaggtcataacgctacggcgattgatcttgtggctagcgggatcgaccctcgccaactggaacagattggcacatgggagcagtactcagaaccattgttcaccctgatcgaatcgattccggaaggtaagaaagtcattctggtaggagaatccggtggcggcatcaatattgcactggccgcggagaaatatccggagaaagtgagcgccctcgtctttcacaacgcacttatgcccgatatcgatcacagtccagcgttcgtgtacaagaaattttgtgaagttttcactgactggaaagattcgatcttcagcaattatacctacggtaacgacacggttaccgcggtggaattgggagatcgtactctggccgagaacatcttctccaattctccgattgaagatgtagaactggcgaaacatctggtccgcaaaggctccttctttgagcaagacttggataccctgccgaactttacgtcggaagggtatggttcaattcgtcgtgtgtatgtttacggcgaagaagaccagatctttagccgcgattttcagttatggcaaattaataattataagcctgataaagtgtactgtgtaccgagtgctgaccacaagattcagatcagcaaagtcaacgagctggcccagattctccaagaagttgcaaactctgcgagtgatcttcttgcagtggct

SEQ ID NO: 120 - protein, 263 aa, synthetic construct
  REGION 1..263: note = Round 1 (Activity)
MVSAHFILIHTICHGAWLWYKLIPLLQSAGHNATAIDLVASGIDPRQLEQIGTWEQYSEPLFTLIESIPEGKKVILVGESGGGINIALAAEKYPEKVSALVFHNALMPDIDHSPAFVYKKFCEVFTDWKDSIFSNYTYGNDTVTAVELGDRTLAENIFSNSPIEDVELAKHLVRKGSFFEQDLDTLPNFTSEGYGSIRRVYVYGEEDQIFSRDFQLWQINNYKPDKVYCVPSADHKIQISKVNELAQILQEVANSASDLLAVA

SEQ ID NO: 121 - DNA, 789 bp, synthetic construct
  misc_feature 1..789: note = Round 1 (Activity)
  source 1..789: mol_type = other DNA
atggttagtgcgcattttattctgatccacaccatttgccatggcgcctggctctggtataaactgatcccgttattacagtctgcaggtcataacgctacggcgattgatcttgtggctagcgggatcgaccctcgccaactggaacagattggcacatgggagcagtactcagaaccattgttcaccctgatcgaatcgattccggaaggtaagaaagtcattctggtaggagaatccggtggcggcatcaatattgcactggccgcggagaaatatccggagaaagtgagcgccctcgtctttcacaacgcacttatgcccgatatcgatcacagtccagcgttcgtgtacaagaaatttagcgaatatttcactgactggaaagattcgatcttcagcaattatacctacggtaacgacacggttaccgcggtggaattgggagatcgtactctggccgagaacatcttctccaattctccgattgaagatgtagaactggcgaaacatctggtccgcaaaggctccttctttgagcaagacttggataccctgccgaactttacgtcggaagggtatggttcaattcgtcgtgtgtatgtttacggcgaagaagaccagatctttagccgcgattttcagttatggcaaattaataattataagcctgataaagtgtactgtgtaccgagtgctgaccacaagattcagatcagcaaagtcaacgagctggcccagattctccaagaagttgcaaactctgcgagtgatcttcttgcagtggct

SEQ ID NO: 122 - protein, 263 aa, synthetic construct
  REGION 1..263: note = Round 1 (Activity)
MVSAHFILIHTICHGAWLWYKLIPLLQSAGHNATAIDLVASGIDPRQLEQIGTWEQYSEPLFTLIESIPEGKKVILVGESGGGINIALAAEKYPEKVSALVFHNALMPDIDHSPAFVYKKFSEYFTDWKDSIFSNYTYGNDTVTAVELGDRTLAENIFSNSPIEDVELAKHLVRKGSFFEQDLDTLPNFTSEGYGSIRRVYVYGEEDQIFSRDFQLWQINNYKPDKVYCVPSADHKIQISKVNELAQILQEVANSASDLLAVA

SEQ ID NO: 123 - DNA, 789 bp, synthetic construct
  misc_feature 1..789: note = Round 1 (Activity)
  source 1..789: mol_type = other DNA
atggttagtgcgcattttattctgatccacaccatttgccatggcgcctggctgtggtataaactgatcccgttattacagtctgcaggtcataacgtcacggcgattgatcttgtggctagcgggatcgaccctcgccaactggaacagattggcacatgggagcagtactcagaaccattgttcaccctgatcgaatcgctgccggaaggtaagaaagtcattctggtaggagaatccggtggcggcatcaatattgcactggccgcggagaaatatccggagaaagttagcgccctcgtctttcacaacgcacttatgcccgatatcgatcacagtccagcgttcgtgtacaagaaatttagcgaagttttcactgactggaaagattcgatcttcagcaattatacctacggtaacgacacggttaccgcggtggaattgggagatcgtactctggccgagaacatcttctccaattctccgattgaagatgtagaactggcgaaacatctggtccgcaagggctccttctttgagcaagacttggataccctgccgaactttacgtcggaagggtatggttcaattcgtcgtgtgtatgtctacggcgaagaagaccagatctttagccgcgattttcagttatggcaaattaataattatcctcctgataaagtgtactgtgtaccgagtgctgaccacaagatccagtttagcaaagtcaacgagctggcccagattctccaagaagttgcaaactctgcgagtgatcttcttgcagtggct

SEQ ID NO: 124 - protein, 263 aa, synthetic construct
  REGION 1..263: note = Round 1 (Activity)
MVSAHFILIHTICHGAWLWYKLIPLLQSAGHNVTAIDLVASGIDPRQLEQIGTWEQYSEPLFTLIESLPEGKKVILVGESGGGINIALAAEKYPEKVSALVFHNALMPDIDHSPAFVYKKFSEVFTDWKDSIFSNYTYGNDTVTAVELGDRTLAENIFSNSPIEDVELAKHLVRKGSFFEQDLDTLPNFTSEGYGSIRRVYVYGEEDQIFSRDFQLWQINNYPPDKVYCVPSADHKIQFSKVNELAQILQEVANSASDLLAVA

SEQ ID NO: 125 - DNA, 789 bp, synthetic construct
  misc_feature 1..789: note = Round 1 (Activity)
  source 1..789: mol_type = other DNA
atggttagtgcgcattttattctgatccacaccatttgccatggcgcctggctgtggtataaactgatcccgttattacagtctgcaggtcataacgctacggcgattgatcttgtggctagcgggatcgaccctcgccaactggaacagattggcacatgggagcagtactcagaaccattgttcaccctgatcgaatcgatcccggaaggtaagaaagtcattctggtaggagaatccggtggcggcatcaatattgcactggccgcggagaaatatccggagaaagttagcgccctcgtctttcacaacgcacttatgcccgatatcgatcacagtccagcgttcgtgtacaagaaatttagcgaagttttcactgactggaaagattcgatcttcagcaattatacctacggtaacgacacggttaccgcggtggaattgggagatcgtactctggccgagaacatcttctccaattctccgattgaagatgtagaactggcgaaacatctggtccgcaagggctccttctttgagcaagacttggataccctgccgaactttacgtcggaagggtatggttcagttcgtcgtgtgtatatctacggcgaagaagaccagatctttagccgcgattttcagttatggcaaattaataattataagcctgataaagtgtactgtgtaccgagtgctgaccacaagatccagattagcaaagtcaacgagctggcccagattctccaagaagttgcaaactctgcgagtgatcttcttgcagtggct

SEQ ID NO: 126 - protein, 263 aa, synthetic construct
  REGION 1..263: note = Round 1 (Activity)
MVSAHFILIHTICHGAWLWYKLIPLLQSAGHNATAIDLVASGIDPRQLEQIGTWEQYSEPLFTLIESIPEGKKVILVGESGGGINIALAAEKYPEKVSALVFHNALMPDIDHSPAFVYKKFSEVFTDWKDSIFSNYTYGNDTVTAVELGDRTLAENIFSNSPIEDVELAKHLVRKGSFFEQDLDTLPNFTSEGYGSVRRVYIYGEEDQIFSRDFQLWQINNYKPDKVYCVPSADHKIQISKVNELAQILQEVANSASDLLAVA

SEQ ID NO: 127 - DNA, 789 bp, synthetic construct
  misc_feature 1..789: note = Round 1 (Activity)
  source 1..789: mol_type = other DNA
atggttagtgcgcattttattctgatccacaccatttgccatggcgcctggctctggtataaactgatcccgttattacagtctgcaggtcataacgctacggcgattgatcttgtggctagcgggatcgaccctcgccaactggaacagattggcacatgggagcagtactcagaaccattgttcaccctgatcgaatcgattccggaaggtaagaaagtcattctggtaggagaatccggtggcggcatcaatattgcactggccgcggagaaatatccggagaaagtgagcgccctcgtctttcacaacgcacttatgcccgatatcgatcacagtccagcgttcgtgtacaagaaatttagcgaagttttcactgactggaaagattcgatcttcagcaattatacctacggtaacgacacggttaccgcggtggaattgggagatcgtactctggccgagaacatcttctccaattctccgattgaagatgtagaactggcgaaacatctggtccgcaagggctccttctttgagcaagacttggataccctgccgaactttacgtcggaagggtatggttcagttcgtcgtgtgtatgtttacggcgaagaagaccagatctttagccgcgattttcagttatggcaaattaataattataagcctgataaagtgtactgtgtaccgagtgctgaccacaagattcagatcagcaaagtcaacgagctggcccagattctccaagaagttgcaaactctgcgagtgatcttcttgcagtggct

SEQ ID NO: 128 - protein, 263 aa, synthetic construct
  REGION 1..263: note = Round 1 (Activity)
MVSAHFILIHTICHGAWLWYKLIPLLQSAGHNATAIDLVASGIDPRQLEQIGTWEQYSEPLFTLIESIPEGKKVILVGESGGGINIALAAEKYPEKVSALVFHNALMPDIDHSPAFVYKKFSEVFTDWKDSIFSNYTYGNDTVTAVELGDRTLAENIFSNSPIEDVELAKHLVRKGSFFEQDLDTLPNFTSEGYGSVRRVYVYGEEDQIFSRDFQLWQINNYKPDKVYCVPSADHKIQISKVNELAQILQEVANSASDLLAVA

SEQ ID NO: 129 - DNA, 789 bp, synthetic construct
  misc_feature 1..789: note = Round 1 (Activity)
  source 1..789: mol_type = other DNA
atggttagtgcgcattttattctgatccacaccatttgccatggcgcctggctgtggtataaactgatcccgttattacagtctgcaggtcataacgccacggcgattgatcttgtggctagcgggatcgaccctcgccaactggaacagattggcacatgggagcagtactcagaaccattgttcaccctgatcgaatcgatcccggaaggtgagaaagtcattctggtaggagaatccggtggcggcatcaatattgcactggccgcggagaaatatccggagaaaattagcgccctcgtctttcacaacgcacttatgcccgatatcgatcacagtccagcgttcgtgtacaagaaatttagcgaagttttcactgactggaaagattcgatcttcagcaattatacctacggtaacgacacggttaccgcggtggaattgggagatcgtactctggccgagaacatctactccaattctccgattgaagatgtagaactggcgaaacatctggtccgcaagggctccttctttgagcaagacttggataccctgccgaactttacgtcggaagggtatggttcaattcgtcgtgtgtatgtttacggcgaagaagaccagatctttagccgcgattttcagttatggcaaattaataattatcctcctgataaagtgtactgtgtaccgagtgctgaccacaagcctcagattagcaaagtcaacgagctggcccagattctccaagaagttgcaaactctgcgagtgatcttcttgcagtggct

SEQ ID NO: 130 - protein, 263 aa, synthetic construct
  REGION 1..263: note = Round 1 (Activity)
MVSAHFILIHTICHGAWLWYKLIPLLQSAGHNATAIDLVASGIDPRQLEQIGTWEQYSEPLFTLIESIPEGEKVILVGESGGGINIALAAEKYPEKISALVFHNALMPDIDHSPAFVYKKFSEVFTDWKDSIFSNYTYGNDTVTAVELGDRTLAENIYSNSPIEDVELAKHLVRKGSFFEQDLDTLPNFTSEGYGSIRRVYVYGEEDQIFSRDFQLWQINNYPPDKVYCVPSADHKPQISKVNELAQILQEVANSASDLLAVA

SEQ ID NO: 131 - DNA, 789 bp, synthetic construct
  misc_feature 1..789: note = Round 1 (Activity)
  source 1..789: mol_type = other DNA
atggttagtgcgcattttattctgatccacaccatttgccatggcgcctggctctggtataaactgatcccgttattacagtctgcaggtcataacgctacggcgattgatcttgtggctagcgggatcgaccctcgccaactggaacagattggcacatgggagcagtactcagaaccattgttcaccctgatcgaatcgattccggaaggtaagaaagtcattctggtaggagaatccggtggcggcatcaatattgcactggccgcggagaaatatccggagaaagtgagcgccctcgtctttcacaacgcacttatgcccgatatcgatcacagtccagcgttcgtgtacaagaaatttagcgaagagttcactgactggaaagattcgatcttcagcaattatacctacggtaacgacacggttaccgcggtggaattgggagatcgtactctggccgagaacatcttctccaattctccgattgaagatgtagaactggcgaaacatctggtccgcaaaggctccttctttgagcaagacttggataccctgccgaactttacgtcggaagggtatggttcaattcgtcgtgtgtatgtttacggcgaagaagaccagatctttagccgcgattttcagttatggcaaattaataattataagcctgataaagtgtactgtgtaccgagtgctgaccacaagattcagatcagcaaagtcaacgagctggcccagattctccaagaagttgcaaactctgcgagtgatcttcttgcagtggct

SEQ ID NO: 132 - protein, 263 aa, synthetic construct
  REGION 1..263: note = Round 1 (Activity)
MVSAHFILIHTICHGAWLWYKLIPLLQSAGHNATAIDLVASGIDPRQLEQIGTWEQYSEPLFTLIESIPEGKKVILVGESGGGINIALAAEKYPEKVSALVFHNALMPDIDHSPAFVYKKFSEEFTDWKDSIFSNYTYGNDTVTAVELGDRTLAENIFSNSPIEDVELAKHLVRKGSFFEQDLDTLPNFTSEGYGSIRRVYVYGEEDQIFSRDFQLWQINNYKPDKVYCVPSADHKIQISKVNELAQILQEVANSASDLLAVA

SEQ ID NO: 133 - DNA, 789 bp, synthetic construct
  misc_feature 1..789: note = Round 1 (Activity)
  source 1..789: mol_type = other DNA
atggttagtgcgcattttattctgatccacaccatttgccatggcgcctggtgttggtataaactgatcccgttattacagtctgcaggtcataacgctacggcgattgatcttgtggctagcgggatcgaccctcgccaactggaacagattggcacatgggagcagtactcagaaccattgttcaccctgatcgaatcgctgccggaaggtaagaaagtcattctggtaggagaatccggtggcggcatcaatattgcactggccgcggagaaatatccggagaaagtgagcgccctcgtctttcacaacgcacttatgcccgatatcgatcacagtccagcgttcgtgtacaagaaatttagcgaagttttcactgactggaaagattcgatcttcagcaattatacctacggtaacgacacggttaccgcggtggaattgggagatcgtactctggccgagaacatcttctccaattctccgattgaagatgtagaactggcgaaacatctggtccgcaaaggctccttctttgagcaagacttggataccctgccgaactttacgtcggaagggtatggttcaattcgtcgtgtgtatgtttacggcgaagaagaccagatctttagccgcgattttcagttatggcaaattaataattataagcctgataaagtgtactgtgtaccgagtgctgaccacaagatccagtttagcaaagtcaacgagctggcccagattctccaagaagttgcaaactctgcgagtgatcttcttgcagtggct

SEQ ID NO: 134 - protein, 263 aa, synthetic construct
  REGION 1..263: note = Round 1 (Activity)
MVSAHFILIHTICHGAWCWYKLIPLLQSAGHNATAIDLVASGIDPRQLEQIGTWEQYSEPLFTLIESLPEGKKVILVGESGGGINIALAAEKYPEKVSALVFHNALMPDIDHSPAFVYKKFSEVFTDWKDSIFSNYTYGNDTVTAVELGDRTLAENIFSNSPIEDVELAKHLVRKGSFFEQDLDTLPNFTSEGYGSIRRVYVYGEEDQIFSRDFQLWQINNYKPDKVYCVPSADHKIQFSKVNELAQILQEVANSASDLLAVA

SEQ ID NO: 135 - DNA, 789 bp, synthetic construct
  misc_feature 1..789: note = Round 1 (Activity)
  source 1..789: mol_type = other DNA
atggttagtgcgcattttattctgatccacaccatttgccatggcgcctggctctggtataaactgatcccgttattacagtctgcaggtcataacgctacggcgattgatcttgtggctagcgggatcgaccctcgccaactggaacagattggcacatgggagcagtactcagaaccattgttcaccctgatcgaatcgattccggaaggtaagaaagtcattctggtaggagaatccggtggcggcatcaatattgcactggccgcggagaaatatccggagaaagtgagcgccctcgtctttcacaacgcacttatgcccgatatcgatcacagtccagcgttcgtgtacaagaaatttagcgaaactttcactgactggaaagattcgatcttcagcaattatacctacggtaacgacacggttaccgcggtggaattgggagatcgtactctggccgagaacatcttctccaattctccgattgaagatgtagaactggcgaaacatctggtccgcaaaggctccttctttgagcaagacttggataccctgccgaactttacgtcggaagggtatggttcaattcgtcgtgtgtatgtttacggcgaagaagaccagatctttagccgcgattttcagttatggcaaattaataattataagcctgataaagtgtactgtgtaccgagtgctgaccacaagattcagatcagcaaagtcaacgagctggcccagattctccaagaagttgcaaactctgcgagtgatcttcttgcagtggct

SEQ ID NO: 136 - protein, 263 aa, synthetic construct
  REGION 1..263: note = Round 1 (Activity)
MVSAHFILIHTICHGAWLWYKLIPLLQSAGHNATAIDLVASGIDPRQLEQIGTWEQYSEPLFTLIESIPEGKKVILVGESGGGINIALAAEKYPEKVSALVFHNALMPDIDHSPAFVYKKFSETFTDWKDSIFSNYTYGNDTVTAVELGDRTLAENIFSNSPIEDVELAKHLVRKGSFFEQDLDTLPNFTSEGYGSIRRVYVYGEEDQIFSRDFQLWQINNYKPDKVYCVPSADHKIQISKVNELAQILQEVANSASDLLAVA

SEQ ID NO: 137 - DNA, 789 bp, synthetic construct
  misc_feature 1..789: note = Round 1 (Activity)
  source 1..789: mol_type = other DNA
atggttagtgcgcattttattctgatccacaccatttgccatggcgcctggctctggtataaactgatcccgttattacagtctgcaggtcataacgctacggcgattgatcttgtggctagcgggatcgaccctcgccaactggaacagattggcacatgggagcagtactcagaaccattgttcaccctgatcgaatcgattccggaaggtaagaaagtcattctggtaggagaatccggtggcggcatcaatattgcactggccgcggagaaatatccggagaaagtgagcgccctcgtctttcacaacgcacttatgcccgatatcgatcacagtccagcgttcgtgtacaagaaatttcaggaagttttcactgactggaaagattcgatcttcagcaattatacctacggtaacgacacggttaccgcggtggaattgggagatcgtactctggccgagaacatcttctccaattctccgattgaagatgtagaactggcgaaacatctggtccgcaaaggctccttctttgagcaagacttggataccctgccgaactttacgtcggaagggtatggttcaattcgtcgtgtgtatgtttacggcgaagaagaccagatctttagccgcgattttcagttatggcaaattaataattataagcctgataaagtgtactgtgtaccgagtgctgaccacaagattcagatcagcaaagtcaacgagctggcccagattctccaagaagttgcaaactctgcgagtgatcttcttgcagtggct

SEQ ID NO: 138 - protein, 263 aa, synthetic construct
  REGION 1..263: note = Round 1 (Activity)
MVSAHFILIHTICHGAWLWYKLIPLLQSAGHNATAIDLVASGIDPRQLEQIGTWEQYSEPLFTLIESIPEGKKVILVGESGGGINIALAAEKYPEKVSALVFHNALMPDIDHSPAFVYKKFQEVFTDWKDSIFSNYTYGNDTVTAVELGDRTLAENIFSNSPIEDVELAKHLVRKGSFFEQDLDTLPNFTSEGYGSIRRVYVYGEEDQIFSRDFQLWQINNYKPDKVYCVPSADHKIQISKVNELAQILQEVANSASDLLAVA

SEQ ID NO: 139 - DNA, 789 bp, synthetic construct
  misc_feature 1..789: note = Round 1 (Activity)
  source 1..789: mol_type = other DNA
atggttagtgcgcattttattctgattcacacgatttgctatggcgcctggctctggtataaactgatcccgttattacagtctgcaggtcataacgtcacggcgattgatcttgtggctagcgggatcgaccctcgccaactggaacagattggcacatgggagcagtactcagaaccattgttcaccctgatcgaatcgctgccggaaggtgagaaagtcattctggtaggagaatccggtggcggcatcaatattgcactggccgcggagaaatatccggagaaaattagcgccctcgtctttcacaacgcacttatgcccgatatcgatcacagtccagcgttcgtgtacaagaaatttagcgaagttttcactgactggaaagattcgatcttcagcaattatacctacggtaacgacacggttaccgcggtggaattgggagatcgtactctggccgagaacatcttctccaattctccgattgaagatgtagaactggcgaaacatctggtccgcaagggctccttctttgagcaagacttggataccctgccgaactttacgtcggaagggtatggttcaattcgtcgtgtgtatgtttacggcgaagaagaccagatctttagccgcgattttcagttatggcaaattaataattataagcctgataaagtgtactgtgtaccgagtgctgaccacaagattcagatcagcaaagtcaacgagctggcccagattctccaagaagttgcaaactctgcgagtgatcttcttgcagtggct

SEQ ID NO: 140 - protein, 263 aa, synthetic construct
  REGION 1..263: note = Round 1 (Activity)
MVSAHFILIHTICYGAWLWYKLIPLLQSAGHNVTAIDLVASGIDPRQLEQIGTWEQYSEPLFTLIESLPEGEKVILVGESGGGINIALAAEKYPEKISALVFHNALMPDIDHSPAFVYKKFSEVFTDWKDSIFSNYTYGNDTVTAVELGDRTLAENIFSNSPIEDVELAKHLVRKGSFFEQDLDTLPNFTSEGYGSIRRVYVYGEEDQIFSRDFQLWQINNYKPDKVYCVPSADHKIQISKVNELAQILQEVANSASDLLAVA

SEQ ID NO: 141 - DNA, 789 bp, synthetic construct
  misc_feature 1..789: note = Round 1 (Activity)
  source 1..789: mol_type = other DNA
atggttagtgcgcattttattctgatccacaccatttgccatggcgcctggctctggtataaactgatcccgttattacagtctgcaggtcataacgctacggcgattgatcttgtggctagcgggatcgaccctcgccaactggaacagattggcacatgggagcagtactcagaaccattgttcaccctgatcgaatcgattccggaaggtaagaaagtcattctggtaggagaatccggtggcggcatcaatattgcactggccgcggagaaatatccggagaaagtgagcgccctcgtctttcacaacgcacttatgcccgatatcgatcacagtccagcgttcgtgtacaagaaatttagcgaagttttcactgactggaaagattcgatcttcagcaattatacctacggtaacgacacggttaccgcggtggaattgggagatcgtactctggccgagaacatcttctccaattctccgattgaagatgtagaactggcgaaacatctggtccgcccaggctccttctttgagcaagacttggataccctgccgaactttacgtcggaagggtatggttcaattcgtcgtgtgtatgtttacggcgaagaagaccagatctttagccgcgattttcagttatggcaaattaataattataagcctgataaagtgtactgtgtcccgagtgctgaccacaagattcagatcagcaaagtcaacgagctggcccagattctccaagaagttgcaaactctgcgagtgatcttcttgcagtggct

SEQ ID NO: 142 - protein, 263 aa, synthetic construct
  REGION 1..263: note = Round 1 (Activity)
MVSAHFILIHTICHGAWLWYKLIPLLQSAGHNATAIDLVASGIDPRQLEQIGTWEQYSEPLFTLIESIPEGKKVILVGESGGGINIALAAEKYPEKVSALVFHNALMPDIDHSPAFVYKKFSEVFTDWKDSIFSNYTYGNDTVTAVELGDRTLAENIFSNSPIEDVELAKHLVRPGSFFEQDLDTLPNFTSEGYGSIRRVYVYGEEDQIFSRDFQLWQINNYKPDKVYCVPSADHKIQISKVNELAQILQEVANSASDLLAVA

SEQ ID NO: 143 - DNA, 789 bp, synthetic construct
  misc_feature 1..789: note = Round 1 (Activity)
  source 1..789: mol_type = other DNA
atggttagtgcgcattttattctgatccacaccatttgccatggcgcctggtgttggtataaactgatcccgttattacagtctgcaggtcataacgctacggcgattgatcttgtggctagcgggatcgaccctcgccaactggaacagattggcacatgggagcagtactcagaaccattgttcaccctgatcgaatcgattccggaaggtaagaaagtcattctggtaggagaatccggtggcggcatcaatattgcactggccgcggagaaatatccggagaaagtgagcgccctcgtctttcacaacgcacttatgcccgatatcgatcacagtccagcgttcgtgtacaagaaatttagcgaagttttcactgactggaaagattcgatcttcagcaattatacctacggtaacgacacggttaccgcggtggaattgggagatcgtactctggccgagaacatcttctccaattctccgattgaagatgtagaactggcgaaacatctggtccgcaagggctccttctttgagcaagacttggataccctgccgaactttacgtcggaagggtatggttcaattcgtcgtgtgtatgtttacggcgaagaagaccagatctttagccgcgattttcagttatggcaaattaataattataagcctgataaagtgtactgtgtaccgagtgctgaccacaagatccagtttagcaaagtcaacgagctggcccagattctccaagaagttgcaaactctgcgagtgatcttcttgcagtggct

SEQ ID NO: 144 - protein, 263 aa, synthetic construct
  REGION 1..263: note = Round 1 (Activity)
MVSAHFILIHTICHGAWCWYKLIPLLQSAGHNATAIDLVASGIDPRQLEQIGTWEQYSEPLFTLIESIPEGKKVILVGESGGGINIALAAEKYPEKVSALVFHNALMPDIDHSPAFVYKKFSEVFTDWKDSIFSNYTYGNDTVTAVELGDRTLAENIFSNSPIEDVELAKHLVRKGSFFEQDLDTLPNFTSEGYGSIRRVYVYGEEDQIFSRDFQLWQINNYKPDKVYCVPSADHKIQFSKVNELAQILQEVANSASDLLAVA

SEQ ID NO: 145 - DNA, 789 bp, synthetic construct
  misc_feature 1..789: note = Round 1 (Activity)
  source 1..789: mol_type = other DNA
atggttagtgcgcattttattctgatccacaccatttgccatggcgcctggtgttggtataaactgatcccgttattacagtctgcaggtcataacgctacggcgattgatcttgtggctagcgggatcgaccctcgccaactggaacagattggcacatgggagcagtactcagaaccattgttcaccctgatcgaatcgattccggaaggtaagaaagtcattctggtaggagaatccggtggcggcatcaatattgcactggccgcggagaaatatccggagaaagtgagcgccctcgtctttcacaacgcacttatgcccgatatcgatcacagtccagcgttcgtgtacaagaaatttagcgaagttttcactgactggaaagattcgatcttcagcaattatacctacggtaacgacacggttaccgcggtggaattgggagatcgtactctggccgagaacatcttctccaattctccgattgaagatgtagaactggcgaaacatctggtccgcccaggctccttctttgagcaagacttggataccctgccgaactttacgtcggaagggtatggttcaattcgtcgtgtgtatgtttacggcgaagaagaccagatctttagccgcgattttcagttatggcaaattaataattataagcctgataaagtgtactgtgtaccgagtgctgaccacaagattcagatcagcaaagtcaacgagctggcccagattctccaagaagttgcaaactctgcgagtgatcttcttgcagtggct

SEQ ID NO: 146 - protein, 263 aa, synthetic construct
  REGION 1..263: note = Round 1 (Activity)
MVSAHFILIHTICHGAWCWYKLIPLLQSAGHNATAIDLVASGIDPRQLEQIGTWEQYSEPLFTLIESIPEGKKVILVGESGGGINIALAAEKYPEKVSALVFHNALMPDIDHSPAFVYKKFSEVFTDWKDSIFSNYTYGNDTVTAVELGDRTLAENIFSNSPIEDVELAKHLVRPGSFFEQDLDTLPNFTSEGYGSIRRVYVYGEEDQIFSRDFQLWQINNYKPDKVYCVPSADHKIQISKVNELAQILQEVANSASDLLAVA

SEQ ID NO: 147 - DNA, 789 bp, synthetic construct
  misc_feature 1..789: note = Round 1 (Activity)
  source 1..789: mol_type = other DNA
atggttagtgcgcattttattctgatccacaccatttgccatggcgcctggctctggtataaactgatcccgttattacagtctgcaggtcataacgctacggcgattgatcttggggctagcgggatcgaccctcgccaactggaacagattggcacatgggagcagtactcagaaccattgttcaccctgatcgaatcgattccggaaggtaagaaagtcattctggtaggagaatccggtggcggcatcaatattgcactggccgcggagaaatatccggagaaagtgagcgccctcgtctttcacaacgcacttatgcccgatatcgatcacagtccagcgttcgtgtacaagaaatttagcgaagttttcactgactggaaagattcgatcttcagcaattatacctacggtaacgacacggttaccgcggtggaattgggagatcgtactctggccgagaacatcttctccaattctccgattgaagatgtagaactggcgaaacatctggtccgcaaaggctccttctttgagcaagacttggataccctgccgaactttacgtcggaagggtatggttcaattcgtcgtgtgtatgtttacggcgaagaagaccagatctttagccgcgattttcagttatggcaaattaataattataagcctgataaagtgtactgtgtaccgagtgctgaccacaagattcagatcagcaaagtcaacgagctggcccagattctccaagaagttgcaaactctgcgagtgatcttcttgcagtggct

SEQ ID NO: 148 - protein, 263 aa, synthetic construct
  REGION 1..263: note = Round 1 (Activity)
MVSAHFILIHTICHGAWLWYKLIPLLQSAGHNATAIDLGASGIDPRQLEQIGTWEQYSEPLFTLIESIPEGKKVILVGESGGGINIALAAEKYPEKVSALVFHNALMPDIDHSPAFVYKKFSEVFTDWKDSIFSNYTYGNDTVTAVELGDRTLAENIFSNSPIEDVELAKHLVRKGSFFEQDLDTLPNFTSEGYGSIRRVYVYGEEDQIFSRDFQLWQINNYKPDKVYCVPSADHKIQISKVNELAQILQEVANSASDLLAVA

SEQ ID NO: 149 - DNA, 789 bp, synthetic construct
  misc_feature 1..789: note = Round 1 (Activity)
  source 1..789: mol_type = other DNA
atggttagtgcgcattttattctgatccacaccatttgccatggcgcctggctctggtataaactgatcccgttattacagtctgcaggtcataacgctacggcgattgatcttgtggctagcgggatcgaccctcgccaactggaacagattggcacatgggagcagtactcagaaccattgttcaccctgatcgaatcgattccggaaggtaagaaagtcattctggtaggagaatccggtggcggcatcaatattgcactggccgcggagaaatatccggagaaagtgagcgccctcgtctttcacaacgcacttatgcccgatatcgatcacagtccagcgttcgtgtacaagaaatttagcgaagttttcactgactataaagattcgatcttcagcaattatacctacggtaacgacacggttaccgcggtggaattgggagatcgtactctggccgagaacatcttctccaattctccgattgaagatgtagaactggcgaaacatctggtccgcaaaggctccttctttgagcaagacttggataccctgccgaactttacgtcggaagggtatggttcaattcgtcgtgtgtatgtttacggcgaagaagaccagatctttagccgcgattttcagttatggcaaattaataattataagcctgataaagtgtactgtgtaccgagtgctgaccacaagattcagatcagcaaagtcaacgagctggcccagattctccaagaagttgcaaactctgcgagtgatcttcttgcagtggct

SEQ ID NO: 150 - protein, 263 aa, synthetic construct
  REGION 1..263: note = Round 1 (Activity)
MVSAHFILIHTICHGAWLWYKLIPLLQSAGHNATAIDLVASGIDPRQLEQIGTWEQYSEPLFTLIESIPEGKKVILVGESGGGINIALAAEKYPEKVSALVFHNALMPDIDHSPAFVYKKFSEVFTDYKDSIFSNYTYGNDTVTAVELGDRTLAENIFSNSPIEDVELAKHLVRKGSFFEQDLDTLPNFTSEGYGSIRRVYVYGEEDQIFSRDFQLWQINNYKPDKVYCVPSADHKIQISKVNELAQILQEVANSASDLLAVA

SEQ ID NO: 151 - DNA, 789 bp, synthetic construct
  misc_feature 1..789: note = Round 1 (Activity)
  source 1..789: mol_type = other DNA
atggttagtgcgcattttattctgatccacaccatttgccatggcgcctggtgttggtataaactgatcccgttattacagtctgcaggtcataacgctacggcgattgatcttgtggctagcgggatcgaccctcgccaactggaacagattggcacatgggagcagtactcagaaccattgttcaccctgatcgaatcgatcccggaaggtaagaaagtcattctggtaggagaatccggtggcggcatcaatattgcactggccgcggagaaatatccggagaaaattagcgccctcgtctttcacaacgcacttatgcccgatatcgatcacagtccagcgttcgtgtacaagaaatttagcgaagttttcactgactggaaagattcgatcttcagcaattatacctacggtaacgacacggttaccgcggtggaattgggagatcgtactctggccgagaacatcttctccaattctccgattgaagatgtagaactggcgaaacatctggtccgcccaggctccttctttgagcaagacttggataccctgccgaactttacgtcggaagggtatggttcaattcgtcgtgtgtatgtttacggcgaagaagaccagatctttagccgcgattttcagttatggcaaattaataattataagcctgataaagtgtactgtgtaccgagtgctgaccacaagcctcagtttagcaaagtcaacgagctggcccagattctccaagaagttgcaaactctgcgagtgatcttcttgcagtggct

SEQ ID NO: 152 - protein, 263 aa, synthetic construct
  REGION 1..263: note = Round 1 (Activity)
MVSAHFILIHTICHGAWCWYKLIPLLQSAGHNATAIDLVASGIDPRQLEQIGTWEQYSEPLFTLIESIPEGKKVILVGESGGGINIALAAEKYPEKISALVFHNALMPDIDHSPAFVYKKFSEVFTDWKDSIFSNYTYGNDTVTAVELGDRTLAENIFSNSPIEDVELAKHLVRPGSFFEQDLDTLPNFTSEGYGSIRRVYVYGEEDQIFSRDFQLWQINNYKPDKVYCVPSADHKPQFSKVNELAQILQEVANSASDLLAVA

SEQ ID NO: 153 - DNA, 789 bp, synthetic construct
  misc_feature 1..789: note = Round 1 (Activity)
  source 1..789: mol_type = other DNA
atggttagtgcgcattttgttctggttcacacgatttgccatggcgcctggctctggtataaactgatcccgttattacagtctgcaggtcataacgccacggcgattgatcttgtggctagcgggatcgaccctcgccaactggaacagattggcacatgggagcagtactcagaaccattgttcaccctgatcgaatcgattccggaaggtaagaaagtcattctggtaggagaatccggtggcggcatcaatattgcactggccgcggagaaatatccggagaaagttagcgccctcgtctttcacaacgcacttatgcccgatatcgatcacagtccagcgttcgtgtacaagaaatttagcgaagttttcactgactggaaagattcgatcttcagcaattatacctacggtaacgacacggttaccgcggtggaattgggagatcgtactctggccgagaacatctactccaattctccgattgaagatgtagaactggcgaaacatctggtccgcccaggctccttctttgagcaagacttggataccctgccgaactttacgtcggaagggtatggttcaattcgtcgtgtgtatgtctacggcgaagaagaccagatctttagccgcgattttcagttatggcaaattaataattataagcctgataaagtgtactgtgtaccgagtgctgaccacaagattcagatcagcaaagtcaacgagctggcccagattctccaagaagttgcaaactctgcgagtgatcttcttgcagtggct

SEQ ID NO: 154 - protein, 263 aa, synthetic construct
  REGION 1..263: note = Round 1 (Activity)
MVSAHFVLVHTICHGAWLWYKLIPLLQSAGHNATAIDLVASGIDPRQLEQIGTWEQYSEPLFTLIESIPEGKKVILVGESGGGINIALAAEKYPEKVSALVFHNALMPDIDHSPAFVYKKFSEVFTDWKDSIFSNYTYGNDTVTAVELGDRTLAENIYSNSPIEDVELAKHLVRPGSFFEQDLDTLPNFTSEGYGSIRRVYVYGEEDQIFSRDFQLWQINNYKPDKVYCVPSADHKIQISKVNELAQILQEVANSASDLLAVA

SEQ ID NO: 155 - DNA, 789 bp, synthetic construct
  misc_feature 1..789: note = Round 1 (Activity)
  source 1..789: mol_type = other DNA
atggttagtgcgcattttgttctgattcacacgatttgccatggcgcctggctctggtataaactgatcccgttattacagtctgcaggtcataacgtcacggcgattgatcttgtggctagcgggatcgaccctcgccaactggaacagattggcacatgggagcagtactcagaaccattgttcaccctgatcgaatcgattccggaaggtaagaaagtcattctggtaggagaatccggtggcggcatcaatattgcactggccgcggagaaatatccggagaaagtgagcgccctcgtctttcacaacgcacttatgcccgatatcgatcacagtccagcgttcgtgtacaagaaatttagcgaagttttcactgactggaaagattcgatcttcagcaattatacctacggtaacgacacggttaccgcggtggaattgggagatcgtactctggccgagaacatcttctccaattctccgattgaagatgtagaactggcgaaacatctggtccgcaagggctccttctttgagcaagacttggataccctgccgaactttacgtcggaagggtatggttcaattcgtcgtgtgtatgtttacggcgaagaagaccagatctttagccgcgattttcagttatggcaaattaataattataagcctgataaagtgtactgtgtaccgagtgctgaccacaagattcagatcagcaaagtcaacgagctggcccagattctccaagaagttgcaaactctgcgagtgatcttcttgcagtggct

SEQ ID NO: 156 - protein, 263 aa, synthetic construct
  REGION 1..263: note = Round 1 (Activity)
MVSAHFVLIHTICHGAWLWYKLIPLLQSAGHNVTAIDLVASGIDPRQLEQIGTWEQYSEPLFTLIESIPEGKKVILVGESGGGINIALAAEKYPEKVSALVFHNALMPDIDHSPAFVYKKFSEVFTDWKDSIFSNYTYGNDTVTAVELGDRTLAENIFSNSPIEDVELAKHLVRKGSFFEQDLDTLPNFTSEGYGSIRRVYVYGEEDQIFSRDFQLWQINNYKPDKVYCVPSADHKIQISKVNELAQILQEVANSASDLLAVA

SEQ ID NO: 157 - DNA, 789 bp, synthetic construct
  misc_feature 1..789: note = Round 1 (Activity)
  source 1..789: mol_type = other DNA
atggttagtgcgcattttattctgatccacaccatttgccatggcgcctggctctggtataaactgatcccgttattacagtctgcaggtcataacgctacggcgattgatcttgtggctagcgggatcgaccctcgccaactggaacagattggcacatgggagcagtactcagaaccattgttcaccctgatcgaatcgattccggaaggtaagaaagtcattctggtaggagaatccggtggcggcatcaatattgcactggccgcggagaaatatccggagaaagtgagcgccctcgtctttcacaacgcacttatgcccgatatcgatcacagtccagcgttcgtgtacaagaaatatagcgaagttttcactgactggaaagattcgatcttcagcaattatacctacggtaacgacacggttaccgcggtggaattgggagatcgtactctggccgagaacatcttctccaattctccgattgaagatgtagaactggcgaaacatctggtccgcaaaggctccttctttgagcaagacttggataccctgccgaactttacgtcggaagggtatggttcaattcgtcgtgtgtatgtttacggcgaagaagaccagatctttagccgcgattttcagttatggcaaattaataattataagcctgataaagtgtactgtgtaccgagtgctgaccacaagattcagatcagcaaagtcaacgagctggcccagattctccaagaagttgcaaactctgcgagtgatcttcttgcagtggct

SEQ ID NO: 158 - protein, 263 aa, synthetic construct
  REGION 1..263: note = Round 1 (Activity)
MVSAHFILIHTICHGAWLWYKLIPLLQSAGHNATAIDLVASGIDPRQLEQIGTWEQYSEPLFTLIESIPEGKKVILVGESGGGINIALAAEKYPEKVSALVFHNALMPDIDHSPAFVYKKYSEVFTDWKDSIFSNYTYGNDTVTAVELGDRTLAENIFSNSPIEDVELAKHLVRKGSFFEQDLDTLPNFTSEGYGSIRRVYVYGEEDQIFSRDFQLWQINNYKPDKVYCVPSADHKIQISKVNELAQILQEVANSASDLLAVA

SEQ ID NO: 159 - DNA, 789 bp, synthetic construct
  misc_feature 1..789: note = Round 1 (Activity)
  source 1..789: mol_type = other DNA
atggttagtgcgcattttattctgatccacaccatttgccatggcgcctggctctggtataaactgatcccgttattacagtctgcaggtcataacgctacggcgattgatcttgtggctagcgggatcgaccctcgccaactggaacagattggcacatgggagcagtactcagaaccattgttcaccctgatcgaatcgattccggaaggtaagaaagtcattctggtaggagaatccggtggcggcatcaatattgcactggccgcggagaaatatccggagaaagtgagcgccctcgtctttcacaacgcacttatgcccgatatcgatcacagtccagcgttcgtgtacaagaaatttagcgaagttttcactgactggaaagattcgatcttcagcaattatacctacggtaacgacacggttaccgcggtggaaatgggagatcgtactctggccgagaacatcttctccaattctccgattgaagatgtagaactggcgaaacatctggtccgcaaaggctccttctttgagcaagacttggataccctgccgaactttacgtcggaagggtatggttcaattcgtcgtgtgtatgtttacggcgaagaagaccagatctttagccgcgattttcagttatggcaaattaataattataagcctgataaagtgtactgtgtaccgagtgctgaccacaagattcagatcagcaaagtcaacgagctggcccagattctccaagaagttgcaaactctgcgagtgatcttcttgcagtggct

SEQ ID NO: 160 - protein, 263 aa, synthetic construct
  REGION 1..263: note = Round 1 (Activity)
MVSAHFILIHTICHGAWLWYKLIPLLQSAGHNATAIDLVASGIDPRQLEQIGTWEQYSEPLFTLIESIPEGKKVILVGESGGGINIALAAEKYPEKVSALVFHNALMPDIDHSPAFVYKKFSEVFTDWKDSIFSNYTYGNDTVTAVEMGDRTLAENIFSNSPIEDVELAKHLVRKGSFFEQDLDTLPNFTSEGYGSIRRVYVYGEEDQIFSRDFQLWQINNYKPDKVYCVPSADHKIQISKVNELAQILQEVANSASDLLAVA

SEQ ID NO: 161 - DNA, 789 bp, synthetic construct
  misc_feature 1..789: note = Round 1 (Activity)
  source 1..789: mol_type = other DNA
atggttagtgcgcattttattctgatccacaccatttgccatggcgcctggctgtggtataaactgatcccgttattacagtctgcaggtcataacgccacggcgattgatcttgtggctagcgggatcaaccctcgccaactggaacagattggcacatgggagcagtactcagaaccattgttcaccctgatcgaatcgatcccggaaggtaagaaagtcattctggtaggagaatccggtggcggcatcaatattgcactggccgcggagaaatatccggagaaaattagcgccctcgtctttcacaacgcacttatgcccgatatcgatcacagtccagcgttcgtgtacaagaaatttagcgaagttttcactgactggaaagattcgatcttcagcaattatacctacggtaacgacacggttaccgcggtggaattgggagatcgtactctggccgagaacatcttctccaattctccgattgaagatgtagaactggcgaaacatctggtccgcaagggctccttctttgagcaagacttggataccctgccgaactttacgtcggaagggtatggttcaattcgtcgtgtgtatgtttacggcgaagaagaccagatctttagccgcgattttcagttatggcaaattaataattataagcctgataaagtgtactgtgtaccgagtgctgaccacaagatccagattagcaaagtcaacgagctggcccagattctccaagaagttgcaaactctgcgagtgatcttcttgcagtggct

SEQ ID NO: 162 - protein, 263 aa, synthetic construct
  REGION 1..263: note = Round 1 (Activity)
MVSAHFILIHTICHGAWLWYKLIPLLQSAGHNATAIDLVASGINPRQLEQIGTWEQYSEPLFTLIESIPEGKKVILVGESGGGINIALAAEKYPEKISALVFHNALMPDIDHSPAFVYKKFSEVFTDWKDSIFSNYTYGNDTVTAVELGDRTLAENIFSNSPIEDVELAKHLVRKGSFFEQDLDTLPNFTSEGYGSIRRVYVYGEEDQIFSRDFQLWQINNYKPDKVYCVPSADHKIQISKVNELAQILQEVANSASDLLAVA

SEQ ID NO: 163 - DNA, 789 bp, synthetic construct
  misc_feature 1..789: note = Round 1 (Activity)
  source 1..789: mol_type = other DNA
atggttagtgcgcattttattctgatccacaccatttgccatggcgcctggctctggtataaactgatcccgttattacagtctgcaggtcataacgctacggcgattgatcttgtggctagcgggatcgaccctcgccaactggaacagattggcacatgggagcagtactcagaaccattgttcaccctgatcgaatcgattccggaaggtaagaaagtcattctggtaggagaatccggtggcggcatcaatattgcactggccgcggagaaatatccggagaaagtgagcgccctcgtctttcacaacgcacttatgcccgatatcgatcacagtccagcgttcgtgtacaagaaatttagcgaatgtttcactgactggaaagattcgatcttcagcaattatacctacggtaacgacacggttaccgcggtggaattgggagatcgtactctggccgagaacatcttctccaattctccgattgaagatgtagaactggcgaaacatctggtccgcaaaggctccttctttgagcaagacttggataccctgccgaactttacgtcggaagggtatggttcaattcgtcgtgtgtatgtttacggcgaagaagaccagatctttagccgcgattttcagttatggcaaattaataattataagcctgataaagtgtactgtgtaccgagtgctgaccacaagattcagatcagcaaagtcaacgagctggcccagattctccaagaagttgcaaactctgcgagtgatcttcttgcagtggct

SEQ ID NO: 164 - protein, 263 aa, synthetic construct
  REGION 1..263: note = Round 1 (Activity)
MVSAHFILIHTICHGAWLWYKLIPLLQSAGHNATAIDLVASGIDPRQLEQIGTWEQYSEPLFTLIESIPEGKKVILVGESGGGINIALAAEKYPEKVSALVFHNALMPDIDHSPAFVYKKFSECFTDWKDSIFSNYTYGNDTVTAVELGDRTLAENIFSNSPIEDVELAKHLVRKGSFFEQDLDTLPNFTSEGYGSIRRVYVYGEEDQIFSRDFQLWQINNYKPDKVYCVPSADHKIQISKVNELAQILQEVANSASDLLAVA

SEQ ID NO: 165 - DNA, 789 bp, synthetic construct
  misc_feature 1..789: note = Round 1 (Activity)
  source 1..789: mol_type = other DNA
atggttagtgcgcattttattctgatccacaccatttgccatggcgcctggctctggtataaactgatcccgttattacagtctgcaggtcataacgctacggcgattgatcttgtggctagcgggatcgaccctcgccaactggaacagattggcacatgggagcagtactcagaaccattgttcaccctgatcgaatcgattccggaaggtaagaaagtcattctggtaggagaatccggtggcggcatcaatattgcactggccgcggagaaatatccggagaaagtgagcgccctcgtctttcacaacgcacttatgcccgatatcgatcacagtccagcgttcgtgtacaagaaatttagcgaagttaggactgactggaaagattcgatcttcagcaattatacctacggtaacgacacggttaccgcggtggaattgggagatcgtactctggccgagaacatcttctccaattctccgattgaagatgtagaactggcgaaacatctggtccgcaaaggctccttctttgagcaagacttggataccctgccgaactttacgtcggaagggtatggttcaattcgtcgtgtgtatgtttacggcgaagaagaccagatctttagccgcgattttcagttatggcaaattaataattataagcctgataaagtgtactgtgtaccgagtgctgaccacaagattcagatcagcaaagtcaacgagctggcccagattctccaagaagttgcaaactctgcgagtgatcttcttgcagtggct

SEQ ID NO: 166 - protein, 263 aa, synthetic construct
  REGION 1..263: note = Round 1 (Activity)
MVSAHFILIHTICHGAWLWYKLIPLLQSAGHNATAIDLVASGIDPRQLEQIGTWEQYSEPLFTLIESIPEGKKVILVGESGGGINIALAAEKYPEKVSALVFHNALMPDIDHSPAFVYKKFSEVRTDWKDSIFSNYTYGNDTVTAVELGDRTLAENIFSNSPIEDVELAKHLVRKGSFFEQDLDTLPNFTSEGYGSIRRVYVYGEEDQIFSRDFQLWQINNYKPDKVYCVPSADHKIQISKVNELAQILQEVANSASDLLAVA

SEQ ID NO: 167 - DNA, 789 bp, synthetic construct
  misc_feature 1..789: note = Round 1 (Activity)
  source 1..789: mol_type = other DNA
atggttagtgcgcattttattctgatccacaccatttgccatggcgcctggctctggtataaactgatcccgttattacagtctgcaggtcataacgctacggcgattgatcttgtggctagcgggatcgaccctcgccaactggaacagattggcacatgggagcagtactcagaaccattgttcaccctgatcgaatcgattccggaaggtaagaaagtcattctggtaggagaatccggtggcggcatcaatattgcactggccgcggagaaatatccggagaaagtgagcgccctcgtctttcacaacgcacttatgcccgatatcgatcacagtccagcgttcgtgtacaagaaatttagcgaagttttcactgaccataaagattcgatcttcagcaattatacctacggtaacgacacggttaccgcggtggaattgggagatcgtactctggccgagaacatcttctccaattctccgattgaagatgtagaactggcgaaacatctggtccgcaaaggctccttctttgagcaagacttggataccctgccgaactttacgtcggaagggtatggttcaattcgtcgtgtgtatgtttacggcgaagaagaccagatctttagccgcgattttcagttatggcaaattaataattataagcctgataaagtgtactgtgtaccgagtgctgaccacaagattcagatcagcaaagtcaacgagctggcccagattctccaagaagttgcaaactctgcgagtgatcttcttgcagtggct

SEQ ID NO: 168 - protein, 263 aa, synthetic construct
  REGION 1..263: note = Round 1 (Activity)
MVSAHFILIHTICHGAWLWYKLIPLLQSAGHNATAIDLVASGIDPRQLEQIGTWEQYSEPLFTLIESIPEGKKVILVGESGGGINIALAAEKYPEKVSALVFHNALMPDIDHSPAFVYKKFSEVFTDHKDSIFSNYTYGNDTVTAVELGDRTLAENIFSNSPIEDVELAKHLVRKGSFFEQDLDTLPNFTSEGYGSIRRVYVYGEEDQIFSRDFQLWQINNYKPDKVYCVPSADHKIQISKVNELAQILQEVANSASDLLAVA

SEQ ID NO: 169 - DNA, 789 bp, synthetic construct
  misc_feature 1..789: note = Round 1 (Activity)
  source 1..789: mol_type = other DNA
atggttagtgcgcattttattctgatccacaccatttgccatggcgcctggctctggtataaactgatcccgttattacagtctgcaggtcataacgctacggcgattgatcttgtggctagcgggatcgaccctcgccaactggaacagatttcgacatgggagcagtactcagaaccattgttcaccctgatcgaatcgattccggaaggtaagaaagtcattctggtaggagaatccggtggcggcatcaatattgcactggccgcggagaaatatccggagaaagtgagcgccctcgtctttcacaacgcacttatgcccgatatcgatcacagtccagcgttcgtgtacaagaaatttagcgaagttttcactgactggaaagattcgatcttcagcaattatacctacggtaacgacacggttaccgcggtggaattgggagatcgtactctggccgagaacatcttctccaattctccgattgaagatgtagaactggcgaaacatctggtccgcaaaggctccttctttgagcaagacttggataccctgccgaactttacgtcggaagggtatggttcaattcgtcgtgtgtatgtttacggcgaagaagaccagatctttagccgcgattttcagttatggcaaattaataattataagcctgataaagtgtactgtgtaccgagtgctgaccacaagattcagatcagcaaagtcaacgagctggcccagattctccaagaagttgcaaactctgcgagtgatcttcttgcagtggct

SEQ ID NO: 170 - protein, 263 aa, synthetic construct
  REGION 1..263: note = Round 1 (Activity)
MVSAHFILIHTICHGAWLWYKLIPLLQSAGHNATAIDLVASGIDPRQLEQISTWEQYSEPLFTLIESIPEGKKVILVGESGGGINIALAAEKYPEKVSALVFHNALMPDIDHSPAFVYKKFSEVFTDWKDSIFSNYTYGNDTVTAVELGDRTLAENIFSNSPIEDVELAKHLVRKGSFFEQDLDTLPNFTSEGYGSIRRVYVYGEEDQIFSRDFQLWQINNYKPDKVYCVPSADHKIQISKVNELAQILQEVANSASDLLAVA

SEQ ID NO: 171 - DNA, 789 bp, synthetic construct
  misc_feature 1..789: note = Round 1 (Activity)
  source 1..789: mol_type = other DNA
atggttagtgcgcattttattctgatccacaccatttgccatggcgcctggctctggcataaactgatcccgttattacagtctgcaggtcataacgctacggcgattgatcttgtggctagcgggatcgaccctcgccaactggaacagattggcacatgggagcagtactcagaaccattgttcaccctgatcgaatcgattccggaaggtaagaaagtcattctggtaggagaatccggtggcggcatcaatattgcactggccgcggagaaatatccggagaaagtgagcgccctcgtctttcacaacgcacttatgcccgatatcgatcacagtccagcgttcgtgtacaagaaatttagcgaatgtttcactgactggaaagattcgatcttcagcaattatacctacggtaacgacacggttaccgcggtggaattgggagatcgtactctggccgagaacatcttctccaattctccgattgaagatgtagaactggcgaaacatctggtccgcaaaggctccttctttgagcaagacttggataccctgccgaactttacgtcggaagggtatggttcaattcgtcgtgtgtatgtttacggcgaagaagaccagatctttagccgcgattttcagttatggcaaattaataattataagcctgataaagtgtactgtgtaccgagtgctgaccacaagattcagatcagcaaagtcaacgagctggcccagattctccaagaagttgcaaactctgcgagtgatcttcttgcagtggct

SEQ ID NO: 172 - protein, 263 aa, synthetic construct
  REGION 1..263: note = Round 1 (Activity)
MVSAHFILIHTICHGAWLWHKLIPLLQSAGHNATAIDLVASGIDPRQLEQIGTWEQYSEPLFTLIESIPEGKKVILVGESGGGINIALAAEKYPEKVSALVFHNALMPDIDHSPAFVYKKFSECFTDWKDSIFSNYTYGNDTVTAVELGDRTLAENIFSNSPIEDVELAKHLVRKGSFFEQDLDTLPNFTSEGYGSIRRVYVYGEEDQIFSRDFQLWQINNYKPDKVYCVPSADHKIQISKVNELAQILQEVANSASDLLAVA

SEQ ID NO: 173 - DNA, 789 bp, synthetic construct
  misc_feature 1..789: note = Round 1 (Activity)
  source 1..789: mol_type = other DNA
atggttagtgcgcattttattctgatccacaccatttgccatggcgcctggctctggtataaactgatcccgttattacagtctgcaggtcataacgctacggcgattgatcttgtggctagcgggatcgaccctcgccaactggaacagattggcacatgggagcagtactcagaaccattgttcaccctgatcgaatcgattccggaaggtaagaaagtcattctggtaggagaatccggtggcggcatcaatattgcactggccgcggagaaatatccggagaaagtgagcgccctcgtctttcacaacgcacttatgcccgatatcgatcacagtccagcgttcgtgtacaagaaatttagcgaagttttcactgactggaaagattcgatctgtagcaattatacctacggtaacgacacggttaccgcggtggaattgggagatcgtactctggccgagaacatcttctccaattctccgattgaagatgtagaactggcgaaacatctggtccgcaaaggctccttctttgagcaagacttggataccctgccgaactttacgtcggaagggtatggttcaattcgtcgtgtgtatgtttacggcgaagaagaccagatctttagccgcgattttcagttatggcaaattaataattataagcctgataaagtgtactgtgtaccgagtgctgaccacaagattcagatcagcaaagtcaacgagctggcccagattctccaagaagttgcaaactctgcgagtgatcttcttgcagtggct

SEQ ID NO: 174 - protein, 263 aa, synthetic construct
  REGION 1..263: note = Round 1 (Activity)
MVSAHFILIHTICHGAWLWYKLIPLLQSAGHNATAIDLVASGIDPRQLEQIGTWEQYSEPLFTLIESIPEGKKVILVGESGGGINIALAAEKYPEKVSALVFHNALMPDIDHSPAFVYKKFSEVFTDWKDSICSNYTYGNDTVTAVELGDRTLAENIFSNSPIEDVELAKHLVRKGSFFEQDLDTLPNFTSEGYGSIRRVYVYGEEDQIFSRDFQLWQINNYKPDKVYCVPSADHKIQISKVNELAQILQEVANSASDLLAVA

SEQ ID NO: 175 - DNA, 789 bp, synthetic construct
  misc_feature 1..789: note = Round 1 (Activity)
  source 1..789: mol_type = other DNA
atggttagtgcgcattttattctgatccacaccatttgccatggcgcctggctctggtataaactgatcccgttattacagtctgcaggtcataacgctacggcgattgatcttgtggctagcgggatcgaccctcgccaactggaacagattggcacatgggagcagtactcagaaccattgttcaccctgatcgaatcgattccggaaggtaagaaagtcattctggtaggagaatccggtggcggcatcaatattgcactggccgcggagaaatatccggagaaagtgagcgccctcgtctttcacaacgcacttatgcccgatatcgatcacagtccagcgttcgtgtacaagaaatttagcgaagttttcactgactggaaagattcgatcgcgagcaattatacctacggtaacgacacggttaccgcggtggaattgggagatcgtactctggccgagaacatcttctccaattctccgattgaagatgtagaactggcgaaacatctggtccgcaaaggctccttctttgagcaagacttggataccctgccgaactttacgtcggaagggtatggttcaattcgtcgtgtgtatgtttacggcgaagaagaccagatctttagccgcgattttcagttatggcaaattaataattataagcctgataaagtgtactgtgtaccgagtgctgaccacaagattcagatcagcaaagtcaacgagctggcccagattctccaagaagttgcaaactctgcgagtgatcttcttgcagtggct

SEQ ID NO: 176 - protein, 263 aa, synthetic construct
  REGION 1..263: note = Round 1 (Activity)
MVSAHFILIHTICHGAWLWYKLIPLLQSAGHNATAIDLVASGIDPRQLEQIGTWEQYSEPLFTLIESIPEGKKVILVGESGGGINIALAAEKYPEKVSALVFHNALMPDIDHSPAFVYKKFSEVFTDWKDSIASNYTYGNDTVTAVELGDRTLAENIFSNSPIEDVELAKHLVRKGSFFEQDLDTLPNFTSEGYGSIRRVYVYGEEDQIFSRDFQLWQINNYKPDKVYCVPSADHKIQISKVNELAQILQEVANSASDLLAVA

SEQ ID NO: 177 - DNA, 789 bp, synthetic construct
  misc_feature 1..789: note = Round 1 (Selectivity)
  source 1..789: mol_type = other DNA
atggttagtgcgcattttgttctgattcacgggatttgccatggcgcctggctctggtataaactgatcccgttattacagtctgcaggtcataacgccacggcgattgatcttgtggctagcgggatcgaccctcgccaactggaacagattggcacatgggagcagtactcagaaccattgttcaccctgatcgaatcgatcccggaaggtgagaaagtcattctggtaggagaatccggtggcggcatcaatattgcactggccgcggagaaatatccggagaaagtgagcgccctcgtctttcacaacgcacttatgcccgatatcgatcacagtccagcgttcgtgtacaagaaatttagcgaagttttcactgactggaaagattcgatcttcagcaattatacctacggtaacgacacggttaccgcggtggaattgggagatcgtactctggccgagaacatcttctccaattctccgattgaagatgtagaactggcgaaacatctggtccgcaagggctccttctttgagcaagacttggataccctgccgaactttacgtcggaagggtatggttcaattcgtcgtgtgtatgtttacggcgaagaagaccagatctttagccgcgattttcagttatggcaaattaataattataagcctgataaagtgtactgtgtaccgagtgctgaccacaagattcagatcagcaaagtcaacgagctggcccagattctccaagaagttgcaaactctgcgagtgatcttcttgcagtggct

SEQ ID NO: 178 - protein, 263 aa, synthetic construct
  REGION 1..263: note = Round 1 (Selectivity)
MVSAHFVLIHGICHGAWLWYKLIPLLQSAGHNATAIDLVASGIDPRQLEQIGTWEQYSEPLFTLIESIPEGEKVILVGESGGGINIALAAEKYPEKVSALVFHNALMPDIDHSPAFVYKKFSEVFTDWKDSIFSNYTYGNDTVTAVELGDRTLAENIFSNSPIEDVELAKHLVRKGSFFEQDLDTLPNFTSEGYGSIRRVYVYGEEDQIFSRDFQLWQINNYKPDKVYCVPSADHKIQISKVNELAQILQEVANSASDLLAVA

SEQ ID NO: 179 - DNA, 789 bp, synthetic construct
  misc_feature 1..789: note = Round 1 (Selectivity)
  source 1..789: mol_type = other DNA
atggttagtgcgcattttattctggttcacgggatttgccatggcgcctggctctggtataaactgatcccgttattacagtctgcaggtcataacgtcacggcgattgatcttgtggctagcgggatcgaccctcgccaactggaacagattggcacatgggagcagtactcagaaccattgttcaccctgatcgaatcgatcccggaaggtgagaaagtcattctggtaggagaatccggtggcggcatcaatattgcactggccgcggagaaatatccggagaaagtgagcgccctcgtctttcacaacgcacttatgcccgatatcgatcacagtccagcgttcgtgtacaagaaatttagcgaagttttcactgactggaaagattcgatcttcagcaattatacctacggtaacgacacggttaccgcggtggaattgggagatcgtactctggccgagaacatcttctccaattctccgattgaagatgtagaactggcgaaacatctggtccgcaagggctccttctttgagcaagacttggataccctgccgaactttacgtcggaagggtatggttcaattcgtcgtgtgtatgtttacggcgaagaagaccagatctttagccgcgattttcagttatggcaaattaataattataagcctgataaagtgtactgtgtaccgagtgctgaccacaagattcagatcagcaaagtcaacgagctggcccagattctccaagaagttgcaaactctgcgagtgatcttcttgcagtggct

SEQ ID NO: 180 - protein, 263 aa, synthetic construct
  REGION 1..263: note = Round 1 (Selectivity)
MVSAHFILVHGICHGAWLWYKLIPLLQSAGHNVTAIDLVASGIDPRQLEQIGTWEQYSEPLFTLIESIPEGEKVILVGESGGGINIALAAEKYPEKVSALVFHNALMPDIDHSPAFVYKKFSEVFTDWKDSIFSNYTYGNDTVTAVELGDRTLAENIFSNSPIEDVELAKHLVRKGSFFEQDLDTLPNFTSEGYGSIRRVYVYGEEDQIFSRDFQLWQINNYKPDKVYCVPSADHKIQISKVNELAQILQEVANSASDLLAVA

SEQ ID NO: 181 - DNA, 789 bp, synthetic construct
  misc_feature 1..789: note = Round 1 (Selectivity)
  source 1..789: mol_type = other DNA
atggttagtgcgcattttgttctgattcacgggatttgccatggcgcctggctctggtataaactgatcccgttattacagtctgcaggtcataacgtcacggcgattgatcttgtggctagcgggatcgaccctcgccaactggaacagattggcacatgggagcagtactcagaaccattgttcaccctgatcgaatcgatcccggaaggtgagaaagtcattctggtaggagaatccggtggcggcatcaatattgcactggccgcggagaaatatccggagaaaattagcgccctcgtctttcacaacgcacttatgcccgatatcgatcacagtccagcgttcgtgtacaagaaatttagcgaagttttcactgactggaaagattcgatcttcagcaattatacctacggtaacgacacggttaccgcggtggaattgggagatcgtactctggccgagaacatcttctccaattctccgattgaagatgtagaactggcgaaacatctggtccgcaagggctccttctttgagcaagacttggataccctgccgaactttacgtcggaagggtatggttcaattcgtcgtgtgtatgtttacggcgaagaagaccagatctttagccgcgattttcagttatggcaaattaataattataagcctgataaagtgtactgtgtaccgagtgctgaccacaagattcagatcagcaaagtcaacgagctggcccagattctccaagaagttgcaaactctgcgagtgatcttcttgcagtggct

SEQ ID NO: 182 - protein, 263 aa, synthetic construct
  REGION 1..263: note = Round 1 (Selectivity)
MVSAHFVLIHGICHGAWLWYKLIPLLQSAGHNVTAIDLVASGIDPRQLEQIGTWEQYSEPLFTLIESIPEGEKVILVGESGGGINIALAAEKYPEKISALVFHNALMPDIDHSPAFVYKKFSEVFTDWKDSIFSNYTYGNDTVTAVELGDRTLAENIFSNSPIEDVELAKHLVRKGSFFEQDLDTLPNFTSEGYGSIRRVYVYGEEDQIFSRDFQLWQINNYKPDKVYCVPSADHKIQISKVNELAQILQEVANSASDLLAVA

SEQ ID NO: 183 - DNA, 789 bp, synthetic construct
  misc_feature 1..789: note = Round 1 (Selectivity)
  source 1..789: mol_type = other DNA
atggttagtgcgcattttattctggttcacgggatttgccatggcgcctggctctggtataaactgatcccgttattacagtctgcaggtcataacgccacggcgattgatcttgtggctagcgggatcgaccctcgccaactggaacagattggcacatgggagcagtactcagaaccattgttcaccctgatcgaatcgatcccggaaggtgagaaagtcattctggtaggagaatccggtggcggcatcaatattgcactggccgcggagaaatatccggagaaagtgagcgccctcgtctttcacaacgcacttatgcccgatatcgatcacagtccagcgttcgtgtacaagaaatttagcgaagttttcactgactggaaagattcgatcttcagcaattatacctacggtaacgacacggttaccgcggtggaattgggagatcgtactctggccgagaacatcttctccaattctccgattgaagatgtagaactggcgaaacatctggtccgcaaaggctccttctttgagcaagacttggataccctgccgaactttacgtcggaagggtatggttcaattcgtcgtgtgtatgtttacggcgaagaagaccagatctttagccgcgattttcagttatggcaaattaataattataagcctgataaagtgtactgtgtcccgagtgctgaccacaagattcagatcagcaaagtcaacgagctggcccagattctccaagaagttgcaaactctgcgagtgatcttcttgcagtggct

SEQ ID NO: 184 - protein, 263 aa, synthetic construct
  REGION 1..263: note = Round 1 (Selectivity)
MVSAHFILVHGICHGAWLWYKLIPLLQSAGHNATAIDLVASGIDPRQLEQIGTWEQYSEPLFTLIESIPEGEKVILVGESGGGINIALAAEKYPEKVSALVFHNALMPDIDHSPAFVYKKFSEVFTDWKDSIFSNYTYGNDTVTAVELGDRTLAENIFSNSPIEDVELAKHLVRKGSFFEQDLDTLPNFTSEGYGSIRRVYVYGEEDQIFSRDFQLWQINNYKPDKVYCVPSADHKIQISKVNELAQILQEVANSASDLLAVA

SEQ ID NO: 185 - DNA, 789 bp, synthetic construct
  misc_feature 1..789: note = Round 1 (Selectivity)
  source 1..789: mol_type = other DNA
atggttagtgcgcattttgttctgattcacgggatttgccatggcgcctggctctggtataaactgatcccgttattacagtctgcaggtcataacgccacggcgattgatcttgtggctagcgggatcgaccctcgccaactggaacagattggcacatgggagcagtactcagaaccattgttcaccctgatcgaatcgattccggaaggtaagaaagtcattctggtaggagaatccggtggcggcatcaatattgcactggccgcggagaaatatccggagaaagttagcgccctcgtctttcacaacgcacttatgcccgatatcgatcacagtccagcgttcgtgtacaagaaatttagcgaagttttcactgactggaaagattcgatcttcagcaattatacctacggtaacgacacggttaccgcggtggaattgggagatcgtactctggccgagaacatcttctccaattctccgattgaagatgtagaactggcgaaacatctggtccgcaagggctccttctttgagcaagacttggataccctgccgaactttacgtcggaagggtatggttcaattcgtcgtgtgtatgtttacggcgaagaagaccagatctttagccgcgattttcagttatggcaaattaataattataagcctgataaagtgtactgtgtaccgagtgctgaccacaagcctcagattagcaaagtcaacgagctggcccagattctccaagaagttgcaaactctgcgagtgatcttcttgcagtggct

SEQ ID NO: 186 - protein, 263 aa, synthetic construct
  REGION 1..263: note = Round 1 (Selectivity)
MVSAHFVLIHGICHGAWLWYKLIPLLQSAGHNATAIDLVASGIDPRQLEQIGTWEQYSEPLFTLIESIPEGKKVILVGESGGGINIALAAEKYPEKVSALVFHNALMPDIDHSPAFVYKKFSEVFTDWKDSIFSNYTYGNDTVTAVELGDRTLAENIFSNSPIEDVELAKHLVRKGSFFEQDLDTLPNFTSEGYGSIRRVYVYGEEDQIFSRDFQLWQINNYKPDKVYCVPSADHKPQISKVNELAQILQEVANSASDLLAVA

SEQ ID NO: 187 - DNA, 789 bp, synthetic construct
  misc_feature 1..789: note = Round 1 (Selectivity)
  source 1..789: mol_type = other DNA
atggttagtgcgcattttgttctgattcacgggatttgccatggcgcctggctctggtataaactgatcccgttattacagtctgcaggtcataacgtcacggcgattgatcttgtggctagcgggatcgaccctcgccaactggaacagattggcacatgggagcagtactcagaaccattgttcaccctgatcgaatcgatcccggaaggtaagaaagtcattctggtaggagaatccggtggcggcatcaatattgcactggccgcggagaaatatccggagaaaattagcgccctcgtctttcacaacgcacttatgcccgatatcgatcacagtccagcgttcgtgtacaagaaatttagcgaagttttcactgactggaaagattcgatcttcagcaattatacctacggtaacgacacggttaccgcggtggaattgggagatcgtactctggccgagaacatcttctccaattctccgattgaagatgtagaactggcgaaacatctggtccgcaaaggctccttctttgagcaagacttggataccctgccgaactttacgtcggaagggtatggttcaattcgtcgtgtgtatgtttacggcgaagaagaccagatctttagccgcgattttcagttatggcaaattaataattataagcctgataaagtgtactgtgtcccgagtgctgaccacaagattcagatcagcaaagtcaacgagctggcccagattctccaagaagttgcaaactctgcgagtgatcttcttgcagtggct

SEQ ID NO: 188 - protein, 263 aa, synthetic construct
  REGION 1..263: note = Round 1 (Selectivity)
MVSAHFVLIHGICHGAWLWYKLIPLLQSAGHNVTAIDLVASGIDPRQLEQIGTWEQYSEPLFTLIESIPEGKKVILVGESGGGINIALAAEKYPEKISALVFHNALMPDIDHSPAFVYKKFSEVFTDWKDSIFSNYTYGNDTVTAVELGDRTLAENIFSNSPIEDVELAKHLVRKGSFFEQDLDTLPNFTSEGYGSIRRVYVYGEEDQIFSRDFQLWQINNYKPDKVYCVPSADHKIQISKVNELAQILQEVANSASDLLAVA

SEQ ID NO: 189 - DNA, 789 bp, synthetic construct
  misc_feature 1..789: note = Round 1 (Selectivity)
  source 1..789: mol_type = other DNA
atggttagtgcgcattttattctggttcacgggatttgccatggcgcctggctctggtataaactgatcccgttattacagtctgcaggtcataacgtcacggcgattgatcttgtggctagcgggatcgaccctcgccaactggaacagattggcacatgggagcagtactcagaaccattgttcaccctgatcgaatcgattccggaaggtaagaaagtcattctggtaggagaatccggtggcggcatcaatattgcactggccgcggagaaatatccggagaaagtgagcgccctcgtctttcacaacgcacttatgcccgatatcgatcacagtccagcgttcgtgtacaagaaatttagcgaagttttcactgactggaaagattcgatcttcagcaattatacctacggtaacgacacggttaccgcggtggaattgggagatcgtactctggccgagaacatcttctccaattctccgattgaagatgtagaactggcgaaacatctggtccgcaaaggctccttctttgagcaagacttggataccctgccgaactttacgtcggaagggtatggttcaattcgtcgtgtgtatgtttacggcgaagaagaccagatctttagccgcgattttcagttatggcaaattaataattataagcctgataaagtgtactgtgtaccgagtgctgaccacaagattcagatcagcaaagtcaacgagctggcccagattctccaagaagttgcaaactctgcgagtgatcttcttgcagtggct

SEQ ID NO: 190 - protein, 263 aa, synthetic construct
  REGION 1..263: note = Round 1 (Selectivity)
MVSAHFILVHGICHGAWLWYKLIPLLQSAGHNVTAIDLVASGIDPRQLEQIGTWEQYSEPLFTLIESIPEGKKVILVGESGGGINIALAAEKYPEKVSALVFHNALMPDIDHSPAFVYKKFSEVFTDWKDSIFSNYTYGNDTVTAVELGDRTLAENIFSNSPIEDVELAKHLVRKGSFFEQDLDTLPNFTSEGYGSIRRVYVYGEEDQIFSRDFQLWQINNYKPDKVYCVPSADHKIQISKVNELAQILQEVANSASDLLAVA

SEQ ID NO: 191 - DNA, 789 bp, synthetic construct
  misc_feature 1..789: note = Round 1 (Selectivity)
  source 1..789: mol_type = other DNA
atggttagtgcgcattttattctgatccacaccatttgccatggcgcctggctctggtataaactgatcccgttattacagtctgcaggtcataacgctacggcgattgatcttgtggctagcgggatcgaccctcgccaactggaacagattggcacatgggagcagtactcagaaccattgttcaccctgatcgaatcgattccggaaggtaagaaagtcattctggtaggagaatccggtggcggcatcaatattgcactggccgcggagaaatatccggagaaagtgagcgccctcgtctttcacaacgcacttgggcccgatatcgatcacagtccagcgttcgtgtacaagaaatttagcgaagttttcactgactggaaagattcgatcttcagcaattatacctacggtaacgacacggttaccgcggtggaattgggagatcgtactctggccgagaacatcttctccaattctccgattgaagatgtagaactggcgaaacatctggtccgcaaaggctccttctttgagcaagacttggataccctgccgaactttacgtcggaagggtatggttcaattcgtcgtgtgtatgtttacggcgaagaagaccagatctttagccgcgattttcagttatggcaaattaataattataagcctgataaagtgtactgtgtaccgagtgctgaccacaagattcagatcagcaaagtcaacgagctggcccagattctccaagaagttgcaaactctgcgagtgatcttcttgcagtggct

SEQ ID NO: 192 - protein, 263 aa, synthetic construct
  REGION 1..263: note = Round 1 (Selectivity)
MVSAHFILIHTICHGAWLWYKLIPLLQSAGHNATAIDLVASGIDPRQLEQIGTWEQYSEPLFTLIESIPEGKKVILVGESGGGINIALAAEKYPEKVSALVFHNALGPDIDHSPAFVYKKFSEVFTDWKDSIFSNYTYGNDTVTAVELGDRTLAENIFSNSPIEDVELAKHLVRKGSFFEQDLDTLPNFTSEGYGSIRRVYVYGEEDQIFSRDFQLWQINNYKPDKVYCVPSADHKIQISKVNELAQILQEVANSASDLLAVA

SEQ ID NO: 193 - DNA, 789 bp, synthetic construct
  misc_feature 1..789: note = Round 1 (Selectivity)
  source 1..789: mol_type = other DNA
atggttagtgcgcattttattctgatccacaccatttgccatggcgcctggctctggtataaactgatcccgttattacagtctgcaggtcataacgctacggcgattgatcttgtggctagcgggatcgaccctcgccaactggaacagattggcacatgggagcagtactcagaaccattgttcaccctgatcgaatcgattccggaaggtaagaaagtcattctggtaggagaatccggtggcggcatcaatattgcactggccgcggagaaatatccggagaaagtgagcgccctcgtctttcacaacgcacttatgcccgatatcgatcacagtccagcgttcgtgtacaagaaatttagcgaagttttcactgactggaaagattcgatcttcagcaattatacctacggtaacgacacggttaccgcggtggaattgggagatcgtactctggccgagaacatccggtccaattctccgattgaagatgtagaactggcgaaacatctggtccgcaaaggctccttctttgagcaagacttggataccctgccgaactttacgtcggaagggtatggttcaattcgtcgtgtgtatgtttacggcgaagaagaccagatctttagccgcgattttcagttatggcaaattaataattataagcctgataaagtgtactgtgtaccgagtgctgaccacaagattcagatcagcaaagtcaacgagctggcccagattctccaagaagttgcaaactctgcgagtgatcttcttgcagtggct

SEQ ID NO: 194 - protein, 263 aa, synthetic construct
  REGION 1..263: note = Round 1 (Selectivity)
MVSAHFILIHTICHGAWLWYKLIPLLQSAGHNATAIDLVASGIDPRQLEQIGTWEQYSEPLFTLIESIPEGKKVILVGESGGGINIALAAEKYPEKVSALVFHNALMPDIDHSPAFVYKKFSEVFTDWKDSIFSNYTYGNDTVTAVELGDRTLAENIRSNSPIEDVELAKHLVRKGSFFEQDLDTLPNFTSEGYGSIRRVYVYGEEDQIFSRDFQLWQINNYKPDKVYCVPSADHKIQISKVNELAQILQEVANSASDLLAVA

SEQ ID NO: 195 - DNA, 789 bp, synthetic construct
  misc_feature 1..789: note = Round 1 (Selectivity)
  source 1..789: mol_type = other DNA
atggttagtgcgcattttgttctgattcacgggatttgccatggcgcctggctctggtataaactgatcccgttattacagtctgcaggtcataacgctacggcgattgatcttgtggctagcgggatcgaccctcgccaactggaacagattggcacatgggagcagtactcagaaccattgttcaccctgatcgaatcgattccggaaggtaagaaagtcattctggtaggagaatccggtggcggcatcaatattgcactggccgcggagaaatatccggagaaagtgagcgccctcgtctttcacaacgcacttatgcccgatatcgatcacagtccagcgttcgtgtacaagaaatttagcgaagttttcactgactggaaagattcgatcttcagcaattatacctacggtaacgacacggttaccgcggtggaattgggagatcgtactctggccgagaacatctactccaattctccgattgaagatgtagaactggcgaaacatctggtccgcaaaggctccttctttgagcaagacttggataccctgccgaactttacgtcggaagggtatggttcaattcgtcgtgtgtatgtctacggcgaagaagaccagatctttagccgcgattttcagttatggcaaattaataattataagcctgataaagtgtactgtgtcccgagtgctgaccacaagattcagatcagcaaagtcaacgagctggcccagattctccaagaagttgcaaactctgcgagtgatcttcttgcagtggct

SEQ ID NO: 196 - protein, 263 aa, synthetic construct
  REGION 1..263: note = Round 1 (Selectivity)
MVSAHFVLIHGICHGAWLWYKLIPLLQSAGHNATAIDLVASGIDPRQLEQIGTWEQYSEPLFTLIESIPEGKKVILVGESGGGINIALAAEKYPEKVSALVFHNALMPDIDHSPAFVYKKFSEVFTDWKDSIFSNYTYGNDTVTAVELGDRTLAENIYSNSPIEDVELAKHLVRKGSFFEQDLDTLPNFTSEGYGSIRRVYVYGEEDQIFSRDFQLWQINNYKPDKVYCVPSADHKIQISKVNELAQILQEVANSASDLLAVA

SEQ ID NO: 197 - DNA, 789 bp, synthetic construct
  misc_feature 1..789: note = Round 1 (Selectivity)
  source 1..789: mol_type = other DNA
atggttagtgcgcattttattctgatccacaccatttgccatggcgcctggctctggtataaactgatcccgttattacagtctgcaggtcataacgctacggcgattgatcttgtggctagcgggatcgaccctcgccaactggaacagattggcacatgggagcagtactcagaaccattgttcaccctgatcgaatcgattccggaaggtaagaaagtcattctggtaggagaatccggtggcggcatcaattgggcactggccgcggagaaatatccggagaaagtgagcgccctcgtctttcacaacgcacttatgcccgatatcgatcacagtccagcgttcgtgtacaagaaatttagcgaagttttcactgactggaaagattcgatcttcagcaattatacctacggtaacgacacggttaccgcggtggaattgggagatcgtactctggccgagaacatcttctccaattctccgattgaagatgtagaactggcgaaacatctggtccgcaaaggctccttctttgagcaagacttggataccctgccgaactttacgtcggaagggtatggttcaattcgtcgtgtgtatgtttacggcgaagaagaccagatctttagccgcgattttcagttatggcaaattaataattataagcctgataaagtgtactgtgtaccgagtgctgaccacaagattcagatcagcaaagtcaacgagctggcccagattctccaagaagttgcaaactctgcgagtgatcttcttgcagtggct

SEQ ID NO: 198 - protein, 263 aa, synthetic construct
  REGION 1..263: note = Round 1 (Selectivity)
MVSAHFILIHTICHGAWLWYKLIPLLQSAGHNATAIDLVASGIDPRQLEQIGTWEQYSEPLFTLIESIPEGKKVILVGESGGGINWALAAEKYPEKVSALVFHNALMPDIDHSPAFVYKKFSEVFTDWKDSIFSNYTYGNDTVTAVELGDRTLAENIFSNSPIEDVELAKHLVRKGSFFEQDLDTLPNFTSEGYGSIRRVYVYGEEDQIFSRDFQLWQINNYKPDKVYCVPSADHKIQISKVNELAQILQEVANSASDLLAVA

SEQ ID NO: 199 - DNA, 789 bp, synthetic construct
  misc_feature 1..789: note = Round 1 (Selectivity)
  source 1..789: mol_type = other DNA
atggttagtgcgcattttattctgatccacaccatttgccatggcgcctggctctggtataaactgatcccgttattacagtctgcaggtcataacgctacggcgattgatcttgtggctagcgggatcgaccctcgccaactggaacagattggcacatgggagcagtactcagaaccattgttcaccctgatcgaatcgattccggaaggtaagaaagtcattctggtaggagaatccggtggcggcatcaatattgcactggccgcggagaaatatccggagaaagtgagcgccctcgtctttcacaacgcacttatgcccgatatcgatcacagtccagcgttcgtgtacaagaaatttagcgaagttttcactgactggaaagattcgatcttcagcaattatacctacggtaacgacacggttaccgcggtggaattgggagatcgtactctggccgagaacatcttctccaattctccgattgaagatgtagaactggcgaaacatctggtccgcaaaggctccttctttgagcaagacttggataccctgccgaactttacgtcggaagggtatggttcaattcgtcgtgtgtatgtttacggcgaagaagaccagatctttagccgcgattttcagttatggactattaataattataagcctgataaagtgtactgtgtaccgagtgctgaccacaagattcagatcagcaaagtcaacgagctggcccagattctccaagaagttgcaaactctgcgagtgatcttcttgcagtggct

SEQ ID NO: 200 - protein, 263 aa, synthetic construct
  REGION 1..263: note = Round 1 (Selectivity)
MVSAHFILIHTICHGAWLWYKLIPLLQSAGHNATAIDLVASGIDPRQLEQIGTWEQYSEPLFTLIESIPEGKKVILVGESGGGINIALAAEKYPEKVSALVFHNALMPDIDHSPAFVYKKFSEVFTDWKDSIFSNYTYGNDTVTAVELGDRTLAENIFSNSPIEDVELAKHLVRKGSFFEQDLDTLPNFTSEGYGSIRRVYVYGEEDQIFSRDFQLWTINNYKPDKVYCVPSADHKIQISKVNELAQILQEVANSASDLLAVA

SEQ ID NO: 201 - DNA, 789 bp, synthetic construct
  misc_feature 1..789: note = Round 1 (Selectivity)
  source 1..789: mol_type = other DNA
atggttagtgcgcattttattctgatccacaccatttgccatggcgcctggctctggtataaactgatcccgttattacagtctgcaggtcataacgctacggcgattgatcttgtggctagcgggatcgaccctcgccaactggaacagattggcacatgggagcagtactcagaaccattgttcaccctgatcgaatcgattccggaaggtaagaaagtcattctggtaggagaatccggtggcggcatcaatattgcactggccgcggagaaatatccggagaaagtgagcgccctcgtctttcacaacgcacttatgcccgatatcgatcacagtccagcgttcgtgtacaagaaatttagcgaagttttcactgactggaaagattcgatcttcagcaattatacctacggtaacgacacggttaccgcggtggaattgggagatcgtactctggccgagaacatcatttccaattctccgattgaagatgtagaactggcgaaacatctggtccgcaaaggctccttctttgagcaagacttggataccctgccgaactttacgtcggaagggtatggttcaattcgtcgtgtgtatgtttacggcgaagaagaccagatctttagccgcgattttcagttatggcaaattaataattataagcctgataaagtgtactgtgtaccgagtgctgaccacaagattcagatcagcaaagtcaacgagctggcccagattctccaagaagttgcaaactctgcgagtgatcttcttgcagtggct

SEQ ID NO: 202 - protein, 263 aa, synthetic construct
  REGION 1..263: note = Round 1 (Selectivity)
MVSAHFILIHTICHGAWLWYKLIPLLQSAGHNATAIDLVASGIDPRQLEQIGTWEQYSEPLFTLIESIPEGKKVILVGESGGGINIALAAEKYPEKVSALVFHNALMPDIDHSPAFVYKKFSEVFTDWKDSIFSNYTYGNDTVTAVELGDRTLAENIISNSPIEDVELAKHLVRKGSFFEQDLDTLPNFTSEGYGSIRRVYVYGEEDQIFSRDFQLWQINNYKPDKVYCVPSADHKIQISKVNELAQILQEVANSASDLLAVA

SEQ ID NO: 203 - DNA, 789 bp, synthetic construct
  misc_feature 1..789: note = Round 1 (Selectivity)
  source 1..789: mol_type = other DNA
atggttagtgcgcattttattctgatccacaccaagtgccatggcgcctggctctggtataaactgatcccgttattacagtctgcaggtcataacgctacggcgattgatcttgtggctagcgggatcgaccctcgccaactggaacagattggcacatgggagcagtactcagaaccattgttcaccctgatcgaatcgattccggaaggtaagaaagtcattctggtaggagaatccggtggcggcatcaatattgcactggccgcggagaaatatccggagaaagtgagcgccctcgtctttcacaacgcacttatgcccgatatcgatcacagtccagcgttcgtgtacaagaaatttagcgaagttttcactgactggaaagattcgatcttcagcaattatacctacggtaacgacacggttaccgcggtggaattgggagatcgtactctggccgagaacatcttctccaattctccgattgaagatgtagaactggcgaaacatctggtccgcaaaggctccttctttgagcaagacttggataccctgccgaactttacgtcggaagggtatggttcaattcgtcgtgtgtatgtttacggcgaagaagaccagatctttagccgcgattttcagttatggcaaattaataattataagcctgataaagtgtactgtgtaccgagtgctgaccacaagattcagatcagcaaagtcaacgagctggcccagattctccaagaagttgcaaactctgcgagtgatcttcttgcagtggct

SEQ ID NO: 204 - protein, 263 aa, synthetic construct
  REGION 1..263: note = Round 1 (Selectivity)
MVSAHFILIHTKCHGAWLWYKLIPLLQSAGHNATAIDLVASGIDPRQLEQIGTWEQYSEPLFTLIESIPEGKKVILVGESGGGINIALAAEKYPEKVSALVFHNALMPDIDHSPAFVYKKFSEVFTDWKDSIFSNYTYGNDTVTAVELGDRTLAENIFSNSPIEDVELAKHLVRKGSFFEQDLDTLPNFTSEGYGSIRRVYVYGEEDQIFSRDFQLWQINNYKPDKVYCVPSADHKIQISKVNELAQILQEVANSASDLLAVA

SEQ ID NO: 205 - DNA, 789 bp, synthetic construct
  misc_feature 1..789: note = Round 1 (Selectivity)
  source 1..789: mol_type = other DNA
atggttagtgcgcattttattctgatccacaccatttgccatggcgcctggctctggtataaactgatcccgttattacagtctgcaggtcataacgctacggcgattgatcttgtggctagcgggatcgaccctcgccaactggaacagattggcacatgggagcagtactcagaaccattgttcaccctgatcgaatcgattccggaaggtaagaaagtcattctggtaggagaatccggtggcggcatcaatattgcactggccgcggagaaatatccggagaaagtgagcgccctcgtctttcacaacgcacttatgcccgatatcgatcacagtccagcgttcgtgtacaagaaatttagcgaagttttcactgactggaaagattcgatcttcagcaattatacctacggtaacgacacggttaccgcggtggaattgggagatcgtactctggccgagaacatcttctccaattctccgattgaagatgtagaactggcgaaacatctggtcgggaaaggctccttctttgagcaagacttggataccctgccgaactttacgtcggaagggtatggttcaattcgtcgtgtgtatgtttacggcgaagaagaccagatctttagccgcgattttcagttatggcaaattaataattataagcctgataaagtgtactgtgtaccgagtgctgaccacaagattcagatcagcaaagtcaacgagctggcccagattctccaagaagttgcaaactctgcgagtgatcttcttgcagtggct

SEQ ID NO: 206 - protein, 263 aa, synthetic construct
  REGION 1..263: note = Round 1 (Selectivity)
MVSAHFILIHTICHGAWLWYKLIPLLQSAGHNATAIDLVASGIDPRQLEQIGTWEQYSEPLFTLIESIPEGKKVILVGESGGGINIALAAEKYPEKVSALVFHNALMPDIDHSPAFVYKKFSEVFTDWKDSIFSNYTYGNDTVTAVELGDRTLAENIFSNSPIEDVELAKHLVGKGSFFEQDLDTLPNFTSEGYGSIRRVYVYGEEDQIFSRDFQLWQINNYKPDKVYCVPSADHKIQISKVNELAQILQEVANSASDLLAVA

SEQ ID NO: 207 - DNA, 789 bp, synthetic construct
  misc_feature 1..789: note = Round 1 (Selectivity)
  source 1..789: mol_type = other DNA
atggttagtgcgcattttattctgatccacaccatttgccatggcgcctggctctggtataaactgatcccgttattacagtctgcaggtcataacgctacggcgattgatcttgtggctagcgggatcgaccctcgccaactggaacagattggcacatgggagcagtactcagaaccattgttcaccctgatcgaatcgattccggaaggtaagaaagtcattctggtaggagaatccggtggcggcatcaatattgcactggccgcggagaaatatccggagaaagtgagcgccctcgtctttcacaacgcacttatgcccgatatcgatcacagtccagcgttcgtgtacaagaaatttagcgaagttttcactgactggaaagattcgatcttcagcaattatacctacggtaacgacacggttaccgcggtggaattgggagatcgtactctggccgagaacatcttctccaattctccgattgaagatgtagaactggcgaaacatctggtccgcaaaggctccttctttgagcaagacttggataccctgccgaactttacgtcggaagggtatggttcaattcgtcgtgtgtatgtttaccgggaagaagaccagatctttagccgcgattttcagttatggcaaattaataattataagcctgataaagtgtactgtgtaccgagtgctgaccacaagattcagatcagcaaagtcaacgagctggcccagattctccaagaagttgcaaactctgcgagtgatcttcttgcagtggct

SEQ ID NO: 208 - protein, 263 aa, synthetic construct
  REGION 1..263: note = Round 1 (Selectivity)
MVSAHFILIHTICHGAWLWYKLIPLLQSAGHNATAIDLVASGIDPRQLEQIGTWEQYSEPLFTLIESIPEGKKVILVGESGGGINIALAAEKYPEKVSALVFHNALMPDIDHSPAFVYKKFSEVFTDWKDSIFSNYTYGNDTVTAVELGDRTLAENIFSNSPIEDVELAKHLVRKGSFFEQDLDTLPNFTSEGYGSIRRVYVYREEDQIFSRDFQLWQINNYKPDKVYCVPSADHKIQISKVNELAQILQEVANSASDLLAVA

SEQ ID NO: 209 - DNA, 789 bp, synthetic construct
  misc_feature 1..789: note = Round 1 (Selectivity)
  source 1..789: mol_type = other DNA
atggttagtgcgcattttattctgatccacaccatttgccatggcgcctggctctggtataaactgatcccgttattacagtctgcaggtcataacgctacggcgattgatctttgggctagcgggatcgaccctcgccaactggaacagattggcacatgggagcagtactcagaaccattgttcaccctgatcgaatcgattccggaaggtaagaaagtcattctggtaggagaatccggtggcggcatcaatattgcactggccgcggagaaatatccggagaaagtgagcgccctcgtctttcacaacgcacttatgcccgatatcgatcacagtccagcgttcgtgtacaagaaatttagcgaagttttcactgactggaaagattcgatcttcagcaattatacctacggtaacgacacggttaccgcggtggaattgggagatcgtactctggccgagaacatcttctccaattctccgattgaagatgtagaactggcgaaacatctggtccgcaaaggctccttctttgagcaagacttggataccctgccgaactttacgtcggaagggtatggttcaattcgtcgtgtgtatgtttacggcgaagaagaccagatctttagccgcgattttcagttatggcaaattaataattataagcctgataaagtgtactgtgtaccgagtgctgaccacaagattcagatcagcaaagtcaacgagctggcccagattctccaagaagttgcaaactctgcgagtgatcttcttgcagtggct

SEQ ID NO: 210 - protein, 263 aa, synthetic construct
  REGION 1..263: note = Round 1 (Selectivity)
MVSAHFILIHTICHGAWLWYKLIPLLQSAGHNATAIDLWASGIDPRQLEQIGTWEQYSEPLFTLIESIPEGKKVILVGESGGGINIALAAEKYPEKVSALVFHNALMPDIDHSPAFVYKKFSEVFTDWKDSIFSNYTYGNDTVTAVELGDRTLAENIFSNSPIEDVELAKHLVRKGSFFEQDLDTLPNFTSEGYGSIRRVYVYGEEDQIFSRDFQLWQINNYKPDKVYCVPSADHKIQISKVNELAQILQEVANSASDLLAVA

SEQ ID NO: 211 - DNA, 789 bp, synthetic construct
  misc_feature 1..789: note = Round 1 (Selectivity)
  source 1..789: mol_type = other DNA
atggttagtgcgcattttattctgatccacaccatttgccatggcgcctggctctggtataaactgatcccgttattacagtctgcaggtcataacgctacggcgattgatcttgtggctagcgggatcgaccctcgccaactggaacagattggcacatgggagcagtactcagaaccattgttcaccctgatcgaatcgattccggaaggtaagaaagtcattctggtaggagaatccggtggcggcatcaatattgcactggccgcggagaaatatccggagaaagtgagcgccctcgtctttcacaacgcacttatgcccgatatcgatcacagtccagcgttcgtgtacaagaaatttagcgaagttttcactgactggaaagattcgatcttcgataattatacctacggtaacgacacggttaccgcggtggaattgggagatcgtactctggccgagaacatcttctccaattctccgattgaagatgtagaactggcgaaacatctggtccgcaaaggctccttctttgagcaagacttggataccctgccgaactttacgtcggaagggtatggttcaattcgtcgtgtgtatgtttacggcgaagaagaccagatctttagccgcgattttcagttatggcaaattaataattataagcctgataaagtgtactgtgtaccgagtgctgaccacaagattcagatcagcaaagtcaacgagctggcccagattctccaagaagttgcaaactctgcgagtgatcttcttgcagtggct

SEQ ID NO: 212 - protein, 263 aa, synthetic construct
  REGION 1..263: note = Round 1 (Selectivity)
MVSAHFILIHTICHGAWLWYKLIPLLQSAGHNATAIDLVASGIDPRQLEQIGTWEQYSEPLFTLIESIPEGKKVILVGESGGGINIALAAEKYPEKVSALVFHNALMPDIDHSPAFVYKKFSEVFTDWKDSIFDNYTYGNDTVTAVELGDRTLAENIFSNSPIEDVELAKHLVRKGSFFEQDLDTLPNFTSEGYGSIRRVYVYGEEDQIFSRDFQLWQINNYKPDKVYCVPSADHKIQISKVNELAQILQEVANSASDLLAVA

SEQ ID NO: 213 - DNA, 789 bp, synthetic construct
  misc_feature 1..789: note = Round 1 (Selectivity)
  source 1..789: mol_type = other DNA
atggttagtgcgcattttattctgatccacaccatttgccatggcgcctggctctggtataaactgatcccgttattacagtctgcaggtcataacgctacggcgattgatcttgtggctagcgggatcgaccctcgccaactggaacagattggcacatgggagcagtactcagaaccattgttcaccctgatcgaatcgattccggaaggtaagaaagtcattctggtaggagaatccggtggcggcatcaatattgcactggccgcggagaaatatccggagaaagtgagcgccctcgtctttcacaacgcacttatgcccgatatcgatcacagtccagcgttcgtgtacaagaaatttactgaagttttcactgactggaaagattcgatcttcagcaattatacctacggtaacgacacggttaccgcggtggaattgggagatcgtactctggccgagaacatcttctccaattctccgattgaagatgtagaactggcgaaacatctggtccgcaaaggctccttctttgagcaagacttggataccctgccgaactttacgtcggaagggtatggttcaattcgtcgtgtgtatgtttacggcgaagaagaccagatctttagccgcgattttcagttatggcaaattaataattataagcctgataaagtgtactgtgtaccgagtgctgaccacaagattcagatcagcaaagtcaacgagctggcccagattctccaagaagttgcaaactctgcgagtgatcttcttgcagtggct

SEQ ID NO: 214 - protein, 263 aa, synthetic construct
  REGION 1..263: note = Round 1 (Selectivity)
MVSAHFILIHTICHGAWLWYKLIPLLQSAGHNATAIDLVASGIDPRQLEQIGTWEQYSEPLFTLIESIPEGKKVILVGESGGGINIALAAEKYPEKVSALVFHNALMPDIDHSPAFVYKKFTEVFTDWKDSIFSNYTYGNDTVTAVELGDRTLAENIFSNSPIEDVELAKHLVRKGSFFEQDLDTLPNFTSEGYGSIRRVYVYGEEDQIFSRDFQLWQINNYKPDKVYCVPSADHKIQISKVNELAQILQEVANSASDLLAVA

SEQ ID NO: 215 - DNA, 789 bp, synthetic construct
  misc_feature 1..789: note = Round 1 (Selectivity)
  source 1..789: mol_type = other DNA
atggttagtgcgcattttattctgatccacaccatttgccatggcgcctggctctggtataaactgatcccgttattacagtctgcaggtcataacgctacggcgattgatcttgtgctgagcgggatcgaccctcgccaactggaacagattggcacatgggagcagtactcagaaccattgttcaccctgatcgaatcgattccggaaggtaagaaagtcattctggtaggagaatccggtggcggcatcaatattgcactggccgcggagaaatatccggagaaagtgagcgccctcgtctttcacaacgcacttatgcccgatatcgatcacagtccagcgttcgtgtacaagaaatttagcgaagttttcactgactggaaagattcgatcttcagcaattatacctacggtaacgacacggttaccgcggtggaattgggagatcgtactctggccgagaacatcttctccaattctccgattgaagatgtagaactggcgaaacatctggtccgcaaaggctccttctttgagcaagacttggataccctgccgaactttacgtcggaagggtatggttcaattcgtcgtgtgtatgtttacggcgaagaagaccagatctttagccgcgattttcagttatggcaaattaataattataagcctgataaagtgtactgtgtaccgagtgctgaccacaagattcagatcagcaaagtcaacgagctggcccagattctccaagaagttgcaaactctgcgagtgatcttcttgcagtggct

SEQ ID NO: 216 - protein, 263 aa, synthetic construct
  REGION 1..263: note = Round 1 (Selectivity)
MVSAHFILIHTICHGAWLWYKLIPLLQSAGHNATAIDLVLSGIDPRQLEQIGTWEQYSEPLFTLIESIPEGKKVILVGESGGGINIALAAEKYPEKVSALVFHNALMPDIDHSPAFVYKKFSEVFTDWKDSIFSNYTYGNDTVTAVELGDRTLAENIFSNSPIEDVELAKHLVRKGSFFEQDLDTLPNFTSEGYGSIRRVYVYGEEDQIFSRDFQLWQINNYKPDKVYCVPSADHKIQISKVNELAQILQEVANSASDLLAVA

SEQ ID NO: 217 - DNA, 789 bp, synthetic construct
  misc_feature 1..789: note = Round 1 (Selectivity)
  source 1..789: mol_type = other DNA
atggttagtgcgcattttattctgatccacaccatttgccatggcgcctggctctggtataaactgatcccgttattacagtctgcaggtcataacgctacggcgattgatcttgtggctagcgggatcgaccctcgccaactggaacagattggcacatgggagcagtactcagaaccattgttcaccctgatcgaatcgattccggaaggtaagaaagtcattctggtaggagaatccggtggcggcatcaatattgcactggccgcggagaaatatccggagaaagtgagcgccctcgtctttcacaacgcacttatgcccgatatcgatcacagtccagcgttcgtgtacaagaaatttagcgaagttttcactgactggaaagattcgatcttcagcaattatacctacggtaacgacacggttaccgcggtggaattgggagatcgtactctggccgagaacatcttctccaattctccgattgaagatgtagaactggcgaaacatctggtccgcaaaggctccttctttgagcaagacttggataccctgccgaactttacgtcggaagggtatggttcaattcgtcgtgtgtatgtttacggcgaagaagaccagatctttagccgcgattttcagttatggcaaattaataattataagcctgataaagtgtactgtgtaccgagtgctgaccacaagtggcagatcagcaaagtcaacgagctggcccagattctccaagaagttgcaaactctgcgagtgatcttcttgcagtggct

SEQ ID NO: 218 - protein, 263 aa, synthetic construct
  REGION 1..263: note = Round 1 (Selectivity)
MVSAHFILIHTICHGAWLWYKLIPLLQSAGHNATAIDLVASGIDPRQLEQIGTWEQYSEPLFTLIESIPEGKKVILVGESGGGINIALAAEKYPEKVSALVFHNALMPDIDHSPAFVYKKFSEVFTDWKDSIFSNYTYGNDTVTAVELGDRTLAENIFSNSPIEDVELAKHLVRKGSFFEQDLDTLPNFTSEGYGSIRRVYVYGEEDQIFSRDFQLWQINNYKPDKVYCVPSADHKWQISKVNELAQILQEVANSASDLLAVA

SEQ ID NO: 219 - DNA, 789 bp, synthetic construct
  misc_feature 1..789: note = Round 1 (Selectivity)
  source 1..789: mol_type = other DNA
atggttagtgcgcattttattctgatccacaccatttgccatggcgcctggctctggtataaactgatcccgttattacagtctgcaggtcataacgctacggcgattgatcttgtggctagcgggatcgaccctcgccaactggaacagattggcacatgggagcagtactcagaaccattgttcaccctgatcgaatcgattccggaaggtaagaaagtcattctggtaggagaatccggtggcggcatcaatattgcactggccgcggagaaatatccggagaaagtgagcgccctcgtctttcacaacgcacttatgcccgatatcgatcacagtccagcgttcgtgtacaagaaatttagcgaagttttcactgactggaaagattcgatcttcagcaattatacctacggtaacgacacggttaccgcggatgaattgggagatcgtactctggccgagaacatcttctccaattctccgattgaagatgtagaactggcgaaacatctggtccgcaaaggctccttctttgagcaagacttggataccctgccgaactttacgtcggaagggtatggttcaattcgtcgtgtgtatgtttacggcgaagaagaccagatctttagccgcgattttcagttatggcaaattaataattataagcctgataaagtgtactgtgtaccgagtgctgaccacaagattcagatcagcaaagtcaacgagctggcccagattctccaagaagttgcaaactctgcgagtgatcttcttgcagtggct

SEQ ID NO: 220 - protein, 263 aa, synthetic construct
  REGION 1..263: note = Round 1 (Selectivity)
MVSAHFILIHTICHGAWLWYKLIPLLQSAGHNATAIDLVASGIDPRQLEQIGTWEQYSEPLFTLIESIPEGKKVILVGESGGGINIALAAEKYPEKVSALVFHNALMPDIDHSPAFVYKKFSEVFTDWKDSIFSNYTYGNDTVTADELGDRTLAENIFSNSPIEDVELAKHLVRKGSFFEQDLDTLPNFTSEGYGSIRRVYVYGEEDQIFSRDFQLWQINNYKPDKVYCVPSADHKIQISKVNELAQILQEVANSASDLLAVA

SEQ ID NO: 221 - DNA, 789 bp, synthetic construct
  misc_feature 1..789: note = Round 1 (Selectivity)
  source 1..789: mol_type = other DNA
atggttagtgcgcattttattctgatccacaccatttgccatggcgcctggctctggtataaactgatcccgttattacagtctgcaggtcataacgctacggcgattgatcttgtggctagcgggatcgaccctcgccaactggaacagattggcacatgggagcagtactcagaaccattgttcaccctgatcgaatcgattccggaaggtaagaaagtcattctggtaggagaatccggtggcggcatcaatattgcactggccgcggagaaatatccggagaaagtgagcgccctcgtctttcacaacgatcttatgcccgatatcgatcacagtccagcgttcgtgtacaagaaatttagcgaagttttcactgactggaaagattcgatcttcagcaattatacctacggtaacgacacggttaccgcggtggaattgggagatcgtactctggccgagaacatcttctccaattctccgattgaagatgtagaactggcgaaacatctggtccgcaaaggctccttctttgagcaagacttggataccctgccgaactttacgtcggaagggtatggttcaattcgtcgtgtgtatgtttacggcgaagaagaccagatctttagccgcgattttcagttatggcaaattaataattataagcctgataaagtgtactgtgtaccgagtgctgaccacaagattcagatcagcaaagtcaacgagctggcccagattctccaagaagttgcaaactctgcgagtgatcttcttgcagtggct

SEQ ID NO: 222 - protein, 263 aa, synthetic construct
  REGION 1..263: note = Round 1 (Selectivity)
MVSAHFILIHTICHGAWLWYKLIPLLQSAGHNATAIDLVASGIDPRQLEQIGTWEQYSEPLFTLIESIPEGKKVILVGESGGGINIALAAEKYPEKVSALVFHNDLMPDIDHSPAFVYKKFSEVFTDWKDSIFSNYTYGNDTVTAVELGDRTLAENIFSNSPIEDVELAKHLVRKGSFFEQDLDTLPNFTSEGYGSIRRVYVYGEEDQIFSRDFQLWQINNYKPDKVYCVPSADHKIQISKVNELAQILQEVANSASDLLAVA

SEQ ID NO: 223 - DNA, 789 bp, synthetic construct
  misc_feature 1..789: note = Round 1 (Selectivity)
  source 1..789: mol_type = other DNA
atggttagtgcgcattttattctgatccacaccattctgcatggcgcctggctctggtataaactgatcccgttattacagtctgcaggtcataacgctacggcgattgatcttgtggctagcgggatcgaccctcgccaactggaacagattggcacatgggagcagtactcagaaccattgttcaccctgatcgaatcgattccggaaggtaagaaagtcattctggtaggagaatccggtggcggcatcaatattgcactggccgcggagaaatatccggagaaagtgagcgccctcgtctttcacaacgcacttatgcccgatatcgatcacagtccagcgttcgtgtacaagaaatttagcgaagttttcactgactggaaagattcgatcttcagcaattatacctacggtaacgacacggttaccgcggtggaattgggagatcgtactctggccgagaacatcttctccaattctccgattgaagatgtagaactggcgaaacatctggtccgcaaaggctccttctttgagcaagacttggataccctgccgaactttacgtcggaagggtatggttcaattcgtcgtgtgtatgtttacggcgaagaagaccagatctttagccgcgattttcagttatggcaaattaataattataagcctgataaagtgtactgtgtaccgagtgctgaccacaagattcagatcagcaaagtcaacgagctggcccagattctccaagaagttgcaaactctgcgagtgatcttcttgcagtggct

SEQ ID NO: 224 - protein, 263 aa, synthetic construct
  REGION 1..263: note = Round 1 (Selectivity)
MVSAHFILIHTILHGAWLWYKLIPLLQSAGHNATAIDLVASGIDPRQLEQIGTWEQYSEPLFTLIESIPEGKKVILVGESGGGINIALAAEKYPEKVSALVFHNALMPDIDHSPAFVYKKFSEVFTDWKDSIFSNYTYGNDTVTAVELGDRTLAENIFSNSPIEDVELAKHLVRKGSFFEQDLDTLPNFTSEGYGSIRRVYVYGEEDQIFSRDFQLWQINNYKPDKVYCVPSADHKIQISKVNELAQILQEVANSASDLLAVA

SEQ ID NO: 225 - DNA, 789 bp, synthetic construct
  misc_feature 1..789: note = Round 1 (Selectivity)
  source 1..789: mol_type = other DNA
atggttagtgcgcattttattctgatccacaccatttgccatggcgcctggctctggtataaactgatcccgttattacagtctgcaggtcataacgctacggcgattgatcttgtggctagcgggatcgaccctcgccaactggaacagattggcacatgggagcagtactcagaaccattgttcaccctgatcgaatcgattccggaaggtaagaaagtcattctggtaggagaatccggtggcggcatcaatattgcactggccgcggagaaatatccggagaaagtgagcgccctcgtctttcacaacgcacttatgcccgatatcgatcacagtccagcgttcgtgtacaagaaatttagcgaagttttcactgactggaaagtgtcgatcttcagcaattatacctacggtaacgacacggttaccgcggtggaattgggagatcgtactctggccgagaacatcttctccaattctccgattgaagatgtagaactggcgaaacatctggtccgcaaaggctccttctttgagcaagacttggataccctgccgaactttacgtcggaagggtatggttcaattcgtcgtgtgtatgtttacggcgaagaagaccagatctttagccgcgattttcagttatggcaaattaataattataagcctgataaagtgtactgtgtaccgagtgctgaccacaagattcagatcagcaaagtcaacgagctggcccagattctccaagaagttgcaaactctgcgagtgatcttcttgcagtggct

SEQ ID NO: 226 - protein, 263 aa, synthetic construct
  REGION 1..263: note = Round 1 (Selectivity)
MVSAHFILIHTICHGAWLWYKLIPLLQSAGHNATAIDLVASGIDPRQLEQIGTWEQYSEPLFTLIESIPEGKKVILVGESGGGINIALAAEKYPEKVSALVFHNALMPDIDHSPAFVYKKFSEVFTDWKVSIFSNYTYGNDTVTAVELGDRTLAENIFSNSPIEDVELAKHLVRKGSFFEQDLDTLPNFTSEGYGSIRRVYVYGEEDQIFSRDFQLWQINNYKPDKVYCVPSADHKIQISKVNELAQILQEVANSASDLLAVA

SEQ ID NO: 227 - DNA, 789 bp, synthetic construct
  misc_feature 1..789: note = Round 1 (Selectivity)
  source 1..789: mol_type = other DNA
atggttagtgcgcattttattctgatccacaccatttgccatggcgcctggctctggtataaactgatcccgttattacagtctgcaggtcataacgctacggcgattgatcttgtggctagcgggatcgaccctcgccaactggaacagattggcacatgggagcagtactcagaaccattgttcaccctgatcgaatcgattccggaaggtaagaaagtcattctggtaggagaatccggtacgggcatcaatattgcactggccgcggagaaatatccggagaaagtgagcgccctcgtctttcacaacgcacttatgcccgatatcgatcacagtccagcgttcgtgtacaagaaatttagcgaagttttcactgactggaaagattcgatcttcagcaattatacctacggtaacgacacggttaccgcggtggaattgggagatcgtactctggccgagaacatcttctccaattctccgattgaagatgtagaactggcgaaacatctggtccgcaaaggctccttctttgagcaagacttggataccctgccgaactttacgtcggaagggtatggttcaattcgtcgtgtgtatgtttacggcgaagaagaccagatctttagccgcgattttcagttatggcaaattaataattataagcctgataaagtgtactgtgtaccgagtgctgaccacaagattcagatcagcaaagtcaacgagctggcccagattctccaagaagttgcaaactctgcgagtgatcttcttgcagtggct

SEQ ID NO: 228 - protein, 263 aa, synthetic construct
  REGION 1..263: note = Round 1 (Selectivity)
MVSAHFILIHTICHGAWLWYKLIPLLQSAGHNATAIDLVASGIDPRQLEQIGTWEQYSEPLFTLIESIPEGKKVILVGESGTGINIALAAEKYPEKVSALVFHNALMPDIDHSPAFVYKKFSEVFTDWKDSIFSNYTYGNDTVTAVELGDRTLAENIFSNSPIEDVELAKHLVRKGSFFEQDLDTLPNFTSEGYGSIRRVYVYGEEDQIFSRDFQLWQINNYKPDKVYCVPSADHKIQISKVNELAQILQEVANSASDLLAVA

SEQ ID NO: 229 - DNA, 789 bp, synthetic construct
  misc_feature 1..789: note = Round 1 (Selectivity)
  source 1..789: mol_type = other DNA
atggttagtgcgcattttattctgatccacaccatttgccatggcgcctggctctggtataaactgatcccgttattacagtctgcaggtcataacgctacggcgattgatcttgtggctagcgggatcgaccctcgccaactggaacagattggcacatgggagcagtactcagaaccattgttcaccctgatcgaatcgattccggaaggtaagaaagtcattctggtaggagaatccggtggcggcatcaatattgcactggccgcggagaaatatccggagaaagtgagcgccctcgtctttcacaacgcacttatgcccgatatcgatcacagtccagcgttcgtgtacaagaaatttagcgaagttttcactgactggaaagattcgatcttcagcaattatacctacggtaacgacacggttaccgcggtggaattgggagatcgtactctggccgagaacatcttctccaattctccgattgaagatgtagaactggcgaaacatctggtccgcaaaggctccttctttgagcaagacttggataccctgccgaactttacgtcggaagggtatggttcaattcgtcgtgtgtatgtttacgtggaagaagaccagatctttagccgcgattttcagttatggcaaattaataattataagcctgataaagtgtactgtgtaccgagtgctgaccacaagattcagatcagcaaagtcaacgagctggcccagattctccaagaagttgcaaactctgcgagtgatcttcttgcagtggct

SEQ ID NO: 230 - protein, 263 aa, synthetic construct
  REGION 1..263: note = Round 1 (Selectivity)
MVSAHFILIHTICHGAWLWYKLIPLLQSAGHNATAIDLVASGIDPRQLEQIGTWEQYSEPLFTLIESIPEGKKVILVGESGGGINIALAAEKYPEKVSALVFHNALMPDIDHSPAFVYKKFSEVFTDWKDSIFSNYTYGNDTVTAVELGDRTLAENIFSNSPIEDVELAKHLVRKGSFFEQDLDTLPNFTSEGYGSIRRVYVYVEEDQIFSRDFQLWQINNYKPDKVYCVPSADHKIQISKVNELAQILQEVANSASDLLAVA

SEQ ID NO: 231 - DNA, 789 bp, synthetic construct
  misc_feature 1..789: note = Round 1 (Selectivity)
  source 1..789: mol_type = other DNA
atggttagtgcgcattttattctgatccacaccatttgccatggcgcctggctctggtataaactgatcccgttattacagtctgcaggtcataacgctacggcgattgatcttgtggctagcgggatcgaccctcgccaactggaacagattggcacatgggagcagtactcagaaccattgttcaccctgatcgaatcgattccggaaggtaagaaagtcattctggtaggagaatccggtggcggcatcaatattgcactggccgcggagaaatatccggagaaagtgagcgccctcgtctttcacaacgcacttatgcccgatatcgatcacagtccagcgttcctttacaagaaatttagcgaagttttcactgactggaaagattcgatcttcagcaattatacctacggtaacgacacggttaccgcggtggaattgggagatcgtactctggccgagaacatcttctccaattctccgattgaagatgtagaactggcgaaacatctggtccgcaaaggctccttctttgagcaagacttggataccctgccgaactttacgtcggaagggtatggttcaattcgtcgtgtgtatgtttacggcgaagaagaccagatctttagccgcgattttcagttatggcaaattaataattataagcctgataaagtgtactgtgtaccgagtgctgaccacaagattcagatcagcaaagtcaacgagctggcccagattctccaagaagttgcaaactctgcgagtgatcttcttgcagtggct

SEQ ID NO: 232 - protein, 263 aa, synthetic construct
  REGION 1..263: note = Round 1 (Selectivity)
MVSAHFILIHTICHGAWLWYKLIPLLQSAGHNATAIDLVASGIDPRQLEQIGTWEQYSEPLFTLIESIPEGKKVILVGESGGGINIALAAEKYPEKVSALVFHNALMPDIDHSPAFLYKKFSEVFTDWKDSIFSNYTYGNDTVTAVELGDRTLAENIFSNSPIEDVELAKHLVRKGSFFEQDLDTLPNFTSEGYGSIRRVYVYGEEDQIFSRDFQLWQINNYKPDKVYCVPSADHKIQISKVNELAQILQEVANSASDLLAVA

SEQ ID NO: 233 - DNA, 789 bp, synthetic construct
  misc_feature 1..789: note = Round 1 (Selectivity)
  source 1..789: mol_type = other DNA
atggttagtgcgcattttattctgatccacaccatttgccatggcgcctggctctggtataaactgatcccgttattacagtctgcaggtcataacgctacggcgattgatcttgtggctagcgggatcgaccctcgccaactggaacagattggcacatgggagcagtactcagaaccattgttcaccctgatcgaatcgattccggaaggtaagaaagtcattctggtaggagaatccggtggcggcatcaatattgcactggccgcggagaaatatccggagaaagtgagcgccctcgtctttcacaacgcactttggcccgatatcgatcacagtccagcgttcgtgtacaagaaatttagcgaagttttcactgactggaaagattcgatcttcagcaattatacctacggtaacgacacggttaccgcggtggaattgggagatcgtactctggccgagaacatcttctccaattctccgattgaagatgtagaactggcgaaacatctggtccgcaaaggctccttctttgagcaagacttggataccctgccgaactttacgtcggaagggtatggttcaattcgtcgtgtgtatgtttacggcgaagaagaccagatctttagccgcgattttcagttatggcaaattaataattataagcctgataaagtgtactgtgtaccgagtgctgaccacaagattcagatcagcaaagtcaacgagctggcccagattctccaagaagttgcaaactctgcgagtgatcttcttgcagtggct

SEQ ID NO: 234 - protein, 263 aa, synthetic construct
  REGION 1..263: note = Round 1 (Selectivity)
MVSAHFILIHTICHGAWLWYKLIPLLQSAGHNATAIDLVASGIDPRQLEQIGTWEQYSEPLFTLIESIPEGKKVILVGESGGGINIALAAEKYPEKVSALVFHNALWPDIDHSPAFVYKKFSEVFTDWKDSIFSNYTYGNDTVTAVELGDRTLAENIFSNSPIEDVELAKHLVRKGSFFEQDLDTLPNFTSEGYGSIRRVYVYGEEDQIFSRDFQLWQINNYKPDKVYCVPSADHKIQISKVNELAQILQEVANSASDLLAVA

SEQ ID NO: 235 - DNA, 789 bp, synthetic construct
  misc_feature 1..789: note = Round 1 (Selectivity)
  source 1..789: mol_type = other DNA
atggttagtgcgcattttattctgatccacaccatttgccatggcgcctggctctggtataaactgatcccgttattacagtctgcaggtcataacgctacggcgattgatcttgtggctagcgggatcgaccctcgccaactggaacagattggcacatgggagcagtactcagaaccattgttcaccctgatcgaatcgattccggaaggtaagaaagtcattctggtaggagaatccggtggcggcatcaatattgcactggccgcggagaaatatccggagaaagtgagcgccctcgtctttcacaacgcacttatgcccgatatcgatcacagtccagcgttcgtgtacaagaaatttagcgaagttttcactgactggaaagattcgatcttcagcaattatacctacggtaacgacacggttaccgcggtggaattgggagatcgtactctggccgagaacatcttctccaattctccgattgaagatgtagaactggcgaaacatctggtccgcaaaggctccttctttgagcaagacttggataccctgccgaactttacgtcggaagggtatggttcaattcgtcgtgtgtatgtttacggcgaagaagaccagatctttagccgcgattttcagttatggcaaattaataattataagcctgataaagtgtactgtgtaccgagtgctgaccacctgattcagatcagcaaagtcaacgagctggcccagattctccaagaagttgcaaactctgcgagtgatcttcttgcagtggct

SEQ ID NO: 236 - protein, 263 aa, synthetic construct
  REGION 1..263: note = Round 1 (Selectivity)
MVSAHFILIHTICHGAWLWYKLIPLLQSAGHNATAIDLVASGIDPRQLEQIGTWEQYSEPLFTLIESIPEGKKVILVGESGGGINIALAAEKYPEKVSALVFHNALMPDIDHSPAFVYKKFSEVFTDWKDSIFSNYTYGNDTVTAVELGDRTLAENIFSNSPIEDVELAKHLVRKGSFFEQDLDTLPNFTSEGYGSIRRVYVYGEEDQIFSRDFQLWQINNYKPDKVYCVPSADHLIQISKVNELAQILQEVANSASDLLAVA

SEQ ID NO: 237 - DNA, 789 bp, synthetic construct
  misc_feature 1..789: note = Round 1 (Selectivity)
  source 1..789: mol_type = other DNA
atggttagtgcgcattttattctgatccacaccatttgccatggcgcctggctctggtataaactgatcccgttattacagtctgcaggtcataacgctacggcgattgatcttgtggctagcgggatcgaccctcgccaactggaacagattggcacatgggagcagtactcagaaccattgttcaccctgatcgaatcgattccggaaggtaagaaagtcattctggtaggagaatccggtggcggcatcaatattgcactggccgcggagaaatatccggagaaagtgagcgccctcgtctttcacaacgcacttatgcccgatatcgatcacagtccagcgttcgtgtacaagaaatttagcgaagttttcactgactggaaagattcgatcttcagcaattatacctacggtaacgacacggttaccgcggtggaattgggagatcgtactctggccgagaacatcttctccaattctccgattgaagatgtagaactggcgaaacatctggtccgcaaaggctccttctttgagcaagacaaggataccctgccgaactttacgtcggaagggtatggttcaattcgtcgtgtgtatgtttacggcgaagaagaccagatctttagccgcgattttcagttatggcaaattaataattataagcctgataaagtgtactgtgtaccgagtgctgaccacaagattcagatcagcaaagtcaacgagctggcccagattctccaagaagttgcaaactctgcgagtgatcttcttgcagtggct

SEQ ID NO: 238 - protein, 263 aa, synthetic construct
  REGION 1..263: note = Round 1 (Selectivity)
MVSAHFILIHTICHGAWLWYKLIPLLQSAGHNATAIDLVASGIDPRQLEQIGTWEQYSEPLFTLIESIPEGKKVILVGESGGGINIALAAEKYPEKVSALVFHNALMPDIDHSPAFVYKKFSEVFTDWKDSIFSNYTYGNDTVTAVELGDRTLAENIFSNSPIEDVELAKHLVRKGSFFEQDKDTLPNFTSEGYGSIRRVYVYGEEDQIFSRDFQLWQINNYKPDKVYCVPSADHKIQISKVNELAQILQEVANSASDLLAVA

SEQ ID NO: 239 - DNA, 789 bp, synthetic construct
  misc_feature 1..789: note = Round 1 (Selectivity)
  source 1..789: mol_type = other DNA
atggttagtgcgcattttattctgatccacaccatttgccatggcgcctggctctggtataaactgatcccgttattacagtctgcaggtcataacgctacggcgattgatcttgtggctagcgggatcgaccctcgccaactggaacagattggcacatgggagcagtactcagaaccattgttcaccctgatcgaatcgattccggaaggtaagaaagtcattctggtaggagaatccggtggcggcatcaatattgcactggccgcggagaaatatccggagaaagtgagcgccctcgtctttcacaacgcacttatgcccgatatcgatcacagtccagcgttcgtgtacaagctgtttagcgaagttttcactgactggaaagattcgatcttcagcaattatacctacggtaacgacacggttaccgcggtggaattgggagatcgtactctggccgagaacatcttctccaattctccgattgaagatgtagaactggcgaaacatctggtccgcaaaggctccttctttgagcaagacttggataccctgccgaactttacgtcggaagggtatggttcaattcgtcgtgtgtatgtttacggcgaagaagaccagatctttagccgcgattttcagttatggcaaattaataattataagcctgataaagtgtactgtgtaccgagtgctgaccacaagattcagatcagcaaagtcaacgagctggcccagattctccaagaagttgcaaactctgcgagtgatcttcttgcagtggct

SEQ ID NO: 240 - protein, 263 aa, synthetic construct
  REGION 1..263: note = Round 1 (Selectivity)
MVSAHFILIHTICHGAWLWYKLIPLLQSAGHNATAIDLVASGIDPRQLEQIGTWEQYSEPLFTLIESIPEGKKVILVGESGGGINIALAAEKYPEKVSALVFHNALMPDIDHSPAFVYKLFSEVFTDWKDSIFSNYTYGNDTVTAVELGDRTLAENIFSNSPIEDVELAKHLVRKGSFFEQDLDTLPNFTSEGYGSIRRVYVYGEEDQIFSRDFQLWQINNYKPDKVYCVPSADHKIQISKVNELAQILQEVANSASDLLAVA

SEQ ID NO: 241 - DNA, 789 bp, synthetic construct
  misc_feature 1..789: note = Round 1 (Selectivity)
  source 1..789: mol_type = other DNA
atggttagtgcgcattttattctgatccacaccatttgccatggcgcctggctctggtataaactgatcccgttattacagtctgcaggtcataacgctacggcgattgatcttgtggctagcgggatcgaccctcgccaactggaacagattggcacatgggagcagtactcagaaccattgttcaccctgatcgaatcgattccggaaggtaagaaagtcattctggtaggagaatccggtggcggcatcaatattgcactggccgcggagaaatatccggagaaagtgagcgccctcgtctttcacaacgcacttatgcccgatatcgatcacagtccagcgttcgtgtacaatttttttagcgaagttttcactgactggaaagattcgatcttcagcaattatacctacggtaacgacacggttaccgcggtggaattgggagatcgtactctggccgagaacatcttctccaattctccgattgaagatgtagaactggcgaaacatctggtccgcaaaggctccttctttgagcaagacttggataccctgccgaactttacgtcggaagggtatggttcaattcgtcgtgtgtatgtttacggcgaagaagaccagatctttagccgcgattttcagttatggcaaattaataattataagcctgataaagtgtactgtgtaccgagtgctgaccacaagattcagatcagcaaagtcaacgagctggcccagattctccaagaagttgcaaactctgcgagtgatcttcttgcagtggct

SEQ ID NO: 242 - protein, 263 aa, synthetic construct
  REGION 1..263: note = Round 1 (Selectivity)
MVSAHFILIHTICHGAWLWYKLIPLLQSAGHNATAIDLVASGIDPRQLEQIGTWEQYSEPLFTLIESIPEGKKVILVGESGGGINIALAAEKYPEKVSALVFHNALMPDIDHSPAFVYNFFSEVFTDWKDSIFSNYTYGNDTVTAVELGDRTLAENIFSNSPIEDVELAKHLVRKGSFFEQDLDTLPNFTSEGYGSIRRVYVYGEEDQIFSRDFQLWQINNYKPDKVYCVPSADHKIQISKVNELAQILQEVANSASDLLAVA

SEQ ID NO: 243 - DNA, 789 bp, synthetic construct
  misc_feature 1..789: note = Round 1 (Selectivity)
  source 1..789: mol_type = other DNA
atggttagtgcgcattttattctgatccacaccatttgcaggggcgcctggctctggtataaactgatcccgttattacagtctgcaggtcataacgctacggcgattgatcttgtggctagcgggatcgaccctcgccaactggaacagattggcacatgggagcagtactcagaaccattgttcaccctgatcgaatcgattccggaaggtaagaaagtcattctggtaggagaatccggtggcggcatcaatattgcactggccgcggagaaatatccggagaaagtgagcgccctcgtctttcacaacgcacttatgcccgatatcgatcacagtccagcgttcgtgtacaagaaatttagcgaagttttcactgactggaaagattcgatcttcagcaattatacctacggtaacgacacggttaccgcggtggaattgggagatcgtactctggccgagaacatcttctccaattctccgattgaagatgtagaactggcgaaacatctggtccgcaaaggctccttctttgagcaagacttggataccctgccgaactttacgtcggaagggtatggttcaattcgtcgtgtgtatgtttacggcgaagaagaccagatctttagccgcgattttcagttatggcaaattaataattataagcctgataaagtgtactgtgtaccgagtgctgaccacaagattcagatcagcaaagtcaacgagctggcccagattctccaagaagttgcaaactctgcgagtgatcttcttgcagtggct

SEQ ID NO: 244 - protein, 263 aa, synthetic construct
  REGION 1..263: note = Round 1 (Selectivity)
MVSAHFILIHTICRGAWLWYKLIPLLQSAGHNATAIDLVASGIDPRQLEQIGTWEQYSEPLFTLIESIPEGKKVILVGESGGGINIALAAEKYPEKVSALVFHNALMPDIDHSPAFVYKKFSEVFTDWKDSIFSNYTYGNDTVTAVELGDRTLAENIFSNSPIEDVELAKHLVRKGSFFEQDLDTLPNFTSEGYGSIRRVYVYGEEDQIFSRDFQLWQINNYKPDKVYCVPSADHKIQISKVNELAQILQEVANSASDLLAVA

SEQ ID NO: 245 - DNA, 789 bp, synthetic construct
  misc_feature 1..789: note = Round 1 (Selectivity)
  source 1..789: mol_type = other DNA
atggttagtgcgcattttattctgatccgtaccatttgccatggcgcctggctctggtataaactgatcccgttattacagtctgcaggtcataacgctacggcgattgatcttgtggctagcgggatcgaccctcgccaactggaacagattggcacatgggagcagtactcagaaccattgttcaccctgatcgaatcgattccggaaggtaagaaagtcattctggtaggagaatccggtggcggcatcaatattgcactggccgcggagaaatatccggagaaagtgagcgccctcgtctttcacaacgcacttatgcccgatatcgatcacagtccagcgttcgtgtacaagaaatttagcgaagttttcactgactggaaagattcgatcttcagcaattatacctacggtaacgacacggttaccgcggtggaattgggagatcgtactctggccgagaacatcttctccaattctccgattgaagatgtagaactggcgaaacatctggtccgcaaaggctccttctttgagcaagacttggataccctgccgaactttacgtcggaagggtatggttcaattcgtcgtgtgtatgtttacggcgaagaagaccagatctttagccgcgattttcagttatggcaaattaataattataagcctgataaagtgtactgtgtaccgagtgctgaccacaagattcagatcagcaaagtcaacgagctggcccagattctccaagaagttgcaaactctgcgagtgatcttcttgcagtggct

SEQ ID NO: 246 - protein, 263 aa, synthetic construct
  REGION 1..263: note = Round 1 (Selectivity)
MVSAHFILIRTICHGAWLWYKLIPLLQSAGHNATAIDLVASGIDPRQLEQIGTWEQYSEPLFTLIESIPEGKKVILVGESGGGINIALAAEKYPEKVSALVFHNALMPDIDHSPAFVYKKFSEVFTDWKDSIFSNYTYGNDTVTAVELGDRTLAENIFSNSPIEDVELAKHLVRKGSFFEQDLDTLPNFTSEGYGSIRRVYVYGEEDQIFSRDFQLWQINNYKPDKVYCVPSADHKIQISKVNELAQILQEVANSASDLLAVA

SEQ ID NO: 247 - DNA, 789 bp, synthetic construct
  misc_feature 1..789: note = Round 1 (Selectivity)
  source 1..789: mol_type = other DNA
atggttagtgcgcattttattctgatccacaccatttgccatggcgcctggctctggtataaactgatcccgttattacagtctgcaggtcataacgctacggcgattgatcttgtggctagcgggatcgaccctcgccaactggaacagattggcacatgggagcagtactcagaaccattgttcaccctgatcgaatcgattccggaaggtaagaaagtcattctggtaggagaatccggtggcggcatcaatattgcactggccgcggagaaatatccggagaaagtgagcgccctcgtctttcacaacgcacttatgcccgatatcgatcacagtccagcgttcgtgtacaagaaatttagcgaagttttcactgactggaaagattcgatcttcagcaattatacctacggtaacgacacggttaccgcggtggaattgggagatcgtactctggccgagaacatcttctccaattctccgattgaagatgtagaactggcgaaacatctggtccgcaaaggctccttctttgagcaagacttggataccctgccgaactttacgtcggaagggtatggttcaattcgtcgtgtgtatgtttacggcgaagaagaccagatctttagccgcgattttcagttatggcaaattaataattataagcctgataaagtgtactgtgtaccgagtgctgaccacggtattcagatcagcaaagtcaacgagctggcccagattctccaagaagttgcaaactctgcgagtgatcttcttgcagtggct

SEQ ID NO: 248 - protein, 263 aa, synthetic construct
  REGION 1..263: note = Round 1 (Selectivity)
MVSAHFILIHTICHGAWLWYKLIPLLQSAGHNATAIDLVASGIDPRQLEQIGTWEQYSEPLFTLIESIPEGKKVILVGESGGGINIALAAEKYPEKVSALVFHNALMPDIDHSPAFVYKKFSEVFTDWKDSIFSNYTYGNDTVTAVELGDRTLAENIFSNSPIEDVELAKHLVRKGSFFEQDLDTLPNFTSEGYGSIRRVYVYGEEDQIFSRDFQLWQINNYKPDKVYCVPSADHGIQISKVNELAQILQEVANSASDLLAVA

SEQ ID NO: 249 - DNA, 789 bp, synthetic construct
  misc_feature 1..789: note = Round 1 (Selectivity)
  source 1..789: mol_type = other DNA
atggttagtgcgcattttattctgatccacaccatttgccatggcgcctggctctggtataaactgatcccgttattacagtctgcaggtcataacgctacggcgattgatcttgtggctagcgggatcgaccctcgccaactggaacagattggcacatgggagcagtactcagaaccattgttcaccctgatcgaatcgattccggaaggtaagaaagtcattctggtaggagaatccggtggcggcatcaatattgcactggccgcggagaaatatccggagaaagtgagcgccctcgtctttcacaacgcacttatgcccgatatcgatcacagtccagcgttcgtgtacaagaaatttagcgaagttttcactgactggaaagattcgatcttcagcaattatacctacggtaacgacacggttaccgcggtggaattgggagatcgtactctggccgagaacatcttctccaattctccgattgaagatgtagaactggcgaaacatctggtccgcaaaggctccttctttgagcaagacttggataccctgccgaactttacgtcggaagggtatggttcaattcgtcgtgtgtatgtttacgaggaagaagaccagatctttagccgcgattttcagttatggcaaattaataattataagcctgataaagtgtactgtgtaccgagtgctgaccacaagattcagatcagcaaagtcaacgagctggcccagattctccaagaagttgcaaactctgcgagtgatcttcttgcagtggct

SEQ ID NO: 250 - protein, 263 aa, synthetic construct
  REGION 1..263: note = Round 1 (Selectivity)
MVSAHFILIHTICHGAWLWYKLIPLLQSAGHNATAIDLVASGIDPRQLEQIGTWEQYSEPLFTLIESIPEGKKVILVGESGGGINIALAAEKYPEKVSALVFHNALMPDIDHSPAFVYKKFSEVFTDWKDSIFSNYTYGNDTVTAVELGDRTLAENIFSNSPIEDVELAKHLVRKGSFFEQDLDTLPNFTSEGYGSIRRVYVYEEEDQIFSRDFQLWQINNYKPDKVYCVPSADHKIQISKVNELAQILQEVANSASDLLAVA

SEQ ID NO: 251 - DNA, 789 bp, synthetic construct
  misc_feature 1..789: note = Round 1 (Selectivity)
  source 1..789: mol_type = other DNA
atggttagtgcgcattttattctgatccacaccatttgccatggcgcctggctctggtataaactgatcccgttattacagtctgcaggtcataacgctacggcgattgatcttgtggctagcgggatcgaccctcgccaactggaacagattggcacatatgagcagtactcagaaccattgttcaccctgatcgaatcgattccggaaggtaagaaagtcattctggtaggagaatccggtggcggcatcaatattgcactggccgcggagaaatatccggagaaagtgagcgccctcgtctttcacaacgcacttatgcccgatatcgatcacagtccagcgttcgtgtacaagaaatttagcgaagttttcactgactggaaagattcgatcttcagcaattatacctacggtaacgacacggttaccgcggtggaattgggagatcgtactctggccgagaacatcttctccaattctccgattgaagatgtagaactggcgaaacatctggtccgcaaaggctccttctttgagcaagacttggataccctgccgaactttacgtcggaagggtatggttcaattcgtcgtgtgtatgtttacggcgaagaagaccagatctttagccgcgattttcagttatggcaaattaataattataagcctgataaagtgtactgtgtaccgagtgctgaccacaagattcagatcagcaaagtcaacgagctggcccagattctccaagaagttgcaaactctgcgagtgatcttcttgcagtggct

SEQ ID NO: 252 - protein, 263 aa, synthetic construct
  REGION 1..263: note = Round 1 (Selectivity)
MVSAHFILIHTICHGAWLWYKLIPLLQSAGHNATAIDLVASGIDPRQLEQIGTYEQYSEPLFTLIESIPEGKKVILVGESGGGINIALAAEKYPEKVSALVFHNALMPDIDHSPAFVYKKFSEVFTDWKDSIFSNYTYGNDTVTAVELGDRTLAENIFSNSPIEDVELAKHLVRKGSFFEQDLDTLPNFTSEGYGSIRRVYVYGEEDQIFSRDFQLWQINNYKPDKVYCVPSADHKIQISKVNELAQILQEVANSASDLLAVA

SEQ ID NO: 253 - DNA, 789 bp, synthetic construct
  misc_feature 1..789: note = Round 1 (Selectivity)
  source 1..789: mol_type = other DNA
atggttagtgcgcattttattctgatccaccggatttgccatggcgcctggctctggtataaactgatcccgttattacagtctgcaggtcataacgctacggcgattgatcttgtggctagcgggatcgaccctcgccaactggaacagattggcacatgggagcagtactcagaaccattgttcaccctgatcgaatcgattccggaaggtaagaaagtcattctggtaggagaatccggtggcggcatcaatattgcactggccgcggagaaatatccggagaaagtgagcgccctcgtctttcacaacgcacttatgcccgatatcgatcacagtccagcgttcgtgtacaagaaatttagcgaagttttcactgactggaaagattcgatcttcagcaattatacctacggtaacgacacggttaccgcggtggaattgggagatcgtactctggccgagaacatcttctccaattctccgattgaagatgtagaactggcgaaacatctggtccgcaaaggctccttctttgagcaagacttggataccctgccgaactttacgtcggaagggtatggttcaattcgtcgtgtgtatgtttacggcgaagaagaccagatctttagccgcgattttcagttatggcaaattaataattataagcctgataaagtgtactgtgtaccgagtgctgaccacaagattcagatcagcaaagtcaacgagctggcccagattctccaagaagttgcaaactctgcgagtgatcttcttgcagtggct

SEQ ID NO: 254 - protein, 263 aa, synthetic construct
  REGION 1..263: note = Round 1 (Selectivity)
MVSAHFILIHRICHGAWLWYKLIPLLQSAGHNATAIDLVASGIDPRQLEQIGTWEQYSEPLFTLIESIPEGKKVILVGESGGGINIALAAEKYPEKVSALVFHNALMPDIDHSPAFVYKKFSEVFTDWKDSIFSNYTYGNDTVTAVELGDRTLAENIFSNSPIEDVELAKHLVRKGSFFEQDLDTLPNFTSEGYGSIRRVYVYGEEDQIFSRDFQLWQINNYKPDKVYCVPSADHKIQISKVNELAQILQEVANSASDLLAVA

SEQ ID NO: 255 - DNA, 789 bp, synthetic construct
  misc_feature 1..789: note = Round 1 (Selectivity)
  source 1..789: mol_type = other DNA
atggttagtgcgcattttattctgatccacaccatttgccatggcgcctggctctggtataaactgatcccgttattacagtctgcaggtcataacgctacggcgattgatcttgtggctagcgggatcgaccctcgccaactggaacagattggcacatgggagcagtactcagaaccattgttcaccctgatcgaatcgattccggaaggtaagaaagtcattctggtaggagaatccggtggcggcatcaatattgcactggccgcggagaaatatccggagaaagtgagcgccctcgtctttcacaacgcacttatgcccgatatcgatcacagtccagcgttcgtgtacaagaaatttagcgaagttttcactgactggaaagattcgatcttcagcaattatacctacggtaacgacacggttaccgcggtggaattgggagatcgtactctggccgagaacatcttctccaattctccgattgaagatgtagaactggcgaaacatctggtccgcaaaggctccttctttgagcaagacttggataccctgccgaactttacgtcggaagggtatggttcaattcgtcgtgtgtatgttcagggcgaagaagaccagatctttagccgcgattttcagttatggcaaattaataattataagcctgataaagtgtactgtgtaccgagtgctgaccacaagattcagatcagcaaagtcaacgagctggcccagattctccaagaagttgcaaactctgcgagtgatcttcttgcagtggct

SEQ ID NO: 256 - protein, 263 aa, synthetic construct
  REGION 1..263: note = Round 1 (Selectivity)
MVSAHFILIHTICHGAWLWYKLIPLLQSAGHNATAIDLVASGIDPRQLEQIGTWEQYSEPLFTLIESIPEGKKVILVGESGGGINIALAAEKYPEKVSALVFHNALMPDIDHSPAFVYKKFSEVFTDWKDSIFSNYTYGNDTVTAVELGDRTLAENIFSNSPIEDVELAKHLVRKGSFFEQDLDTLPNFTSEGYGSIRRVYVQGEEDQIFSRDFQLWQINNYKPDKVYCVPSADHKIQISKVNELAQILQEVANSASDLLAVA

SEQ ID NO: 257 - DNA, 789 bp, synthetic construct
  misc_feature 1..789: note = Round 1 (Selectivity)
  source 1..789: mol_type = other DNA
atggttagtgcgcattttattctgatccacaccatttgccatggcgcctggctctggtataaactgatcccgttattacagtctgcaggtcataacgctacggcgattgatcttgtggctagcgggatcgaccctcgccaactggaacagattggcacatgggagcagtactcagaaccattgttcaccctgatcgaatcgattccggaaggtaagaaagtcattctggtaggagaatccggtggcggcatcaatattgcactggccgcggagaaatatccggagaaagtgagcgccctcgtctttcacaacgcacttatgcccgatatcgatcacagtccagcgttcgtgtacaagaaatttagcgaagttttcactgactggaaagattcgatcttcagcaattatacctacggtaacgacacggttaccgcggtggaattgggagatcgtactctggccgagaacatcttctccaattctccgattgaagatgtagaactggcgaaacatctggtccgcaaaggctccttctttgagcaagacttggataccctgccgaactttacgtcggaagggtatggttcaattcgtcgtgtgtatgtttacggcgaagaagaccagatctttagccgcgattttcagttatggcaaattaataattataagcctgataaagtgtactgtgtaccgagtgctgaccacaagtctcagatcagcaaagtcaacgagctggcccagattctccaagaagttgcaaactctgcgagtgatcttcttgcagtggct

SEQ ID NO: 258 - protein, 263 aa, synthetic construct
  REGION 1..263: note = Round 1 (Selectivity)
MVSAHFILIHTICHGAWLWYKLIPLLQSAGHNATAIDLVASGIDPRQLEQIGTWEQYSEPLFTLIESIPEGKKVILVGESGGGINIALAAEKYPEKVSALVFHNALMPDIDHSPAFVYKKFSEVFTDWKDSIFSNYTYGNDTVTAVELGDRTLAENIFSNSPIEDVELAKHLVRKGSFFEQDLDTLPNFTSEGYGSIRRVYVYGEEDQIFSRDFQLWQINNYKPDKVYCVPSADHKSQISKVNELAQILQEVANSASDLLAVA

SEQ ID NO: 259 - DNA, 789 bp, synthetic construct
  misc_feature 1..789: note = Round 1 (Selectivity)
  source 1..789: mol_type = other DNA
atggttagtgcgcattttattctgatccacaccatttgccatggcgcctggctctggtataaactgatcccgttattacagtctgcaggtcataacgctacggcgattgatcttgtggctagcgggatcgaccctcgccaactggaacagattggcacatgggagcagtactcagaaccattgttcaccctgatcgaatcgctgccggaaggtaagaaagtcattctggtaggagaatccggtggcggcatcaatattgcactggccgcggagaaatatccggagaaagtgagcgccctcgtctttcacaacgcacttatgcccgatatcgatcacagtccagcgttcgtgtacaagaaatttagcgaagttttcactgactggaaagattcgatcttcagcaattatacctacggtaacgacacggttaccgcggtggaattgggagatcgtactctggccgagaacatcttctccaattctccgattgaagatgtagaactggcgaaacatctggtccgcccaggctccttctttgagcaagacttggataccctgccgaactttacgtcggaagggtatggttcaattcgtcgtgtgtatgtttacggcgaagaagaccagatctttagccgcgattttcagttatggcaaattaataattataagcctgataaagtgtactgtgtaccgagtgctgaccacaagatccagtttagcaaagtcaacgagctggcccagattctccaagaagttgcaaactctgcgagtgatcttcttgcagtggct

SEQ ID NO: 260 - protein, 263 aa, synthetic construct
  REGION 1..263: note = Round 1 (Selectivity)
MVSAHFILIHTICHGAWLWYKLIPLLQSAGHNATAIDLVASGIDPRQLEQIGTWEQYSEPLFTLIESLPEGKKVILVGESGGGINIALAAEKYPEKVSALVFHNALMPDIDHSPAFVYKKFSEVFTDWKDSIFSNYTYGNDTVTAVELGDRTLAENIFSNSPIEDVELAKHLVRPGSFFEQDLDTLPNFTSEGYGSIRRVYVYGEEDQIFSRDFQLWQINNYKPDKVYCVPSADHKIQFSKVNELAQILQEVANSASDLLAVA

SEQ ID NO: 261 - DNA, 789 bp, synthetic construct
  misc_feature 1..789: note = Round 1 (Selectivity)
  source 1..789: mol_type = other DNA
atggttagtgcgcattttattctgatccacaccatttgccatggcgcctggctctggtataaactgatcccgttattacagtctgcaggtcataacgctacggcgattgatcttgtggctagcgggatcgaccctcgccaactggaacagattggcacatgggagcagtactcagaaccattgttcaccctgatcgaatcgattccggaaggtaagaaagtcattctggtaggagaatccggtggcggcatcaatattgcactggccgcggagaaatatccggagaaagtgagcgccctcgtctttcacggggcacttatgcccgatatcgatcacagtccagcgttcgtgtacaagaaatttagcgaagttttcactgactggaaagattcgatcttcagcaattatacctacggtaacgacacggttaccgcggtggaattgggagatcgtactctggccgagaacatcttctccaattctccgattgaagatgtagaactggcgaaacatctggtccgcaaaggctccttctttgagcaagacttggataccctgccgaactttacgtcggaagggtatggttcaattcgtcgtgtgtatgtttacggcgaagaagaccagatctttagccgcgattttcagttatggcaaattaataattataagcctgataaagtgtactgtgtaccgagtgctgaccacaagattcagatcagcaaagtcaacgagctggcccagattctccaagaagttgcaaactctgcgagtgatcttcttgcagtggct

SEQ ID NO: 262 - protein, 263 aa, synthetic construct
  REGION 1..263: note = Round 1 (Selectivity)
MVSAHFILIHTICHGAWLWYKLIPLLQSAGHNATAIDLVASGIDPRQLEQIGTWEQYSEPLFTLIESIPEGKKVILVGESGGGINIALAAEKYPEKVSALVFHGALMPDIDHSPAFVYKKFSEVFTDWKDSIFSNYTYGNDTVTAVELGDRTLAENIFSNSPIEDVELAKHLVRKGSFFEQDLDTLPNFTSEGYGSIRRVYVYGEEDQIFSRDFQLWQINNYKPDKVYCVPSADHKIQISKVNELAQILQEVANSASDLLAVA

SEQ ID NO: 263 - DNA, 789 bp, synthetic construct
  misc_feature 1..789: note = Round 1 (Selectivity)
  source 1..789: mol_type = other DNA
atggttagtgcgcattttattctgatccacaccatttgccatggcgcctggctctggtataaactgatcccgttattacagtctgcaggtcataacgctacggcgattgatcttgtggctagcgggatcgaccctcgccaactggaacagattggcacatgggagcagtactcagaaccattgttcaccctgatcgaatcgattccggaaggtaagaaagtcattctggtaggagaatccggtggcggcatcaatattgcactggccgcggagaaatatccggagaaagtgagcgccctcgtctttcacaacgcacttatgcccgatatcgatcacagtccagcgttcgtgtacaagaaatttagcgaagttttcactgactggaaagattcgatcttcagcaattatacctacggtaacgacacggttaccgcggtggaattgggagatcgtactctggccgagaacatcttctccaattctccgattgaagatgtagaactgattaaacatctggtccgcaaaggctccttctttgagcaagacttggataccctgccgaactttacgtcggaagggtatggttcaattcgtcgtgtgtatgtttacggcgaagaagaccagatctttagccgcgattttcagttatggcaaattaataattataagcctgataaagtgtactgtgtaccgagtgctgaccacaagattcagatcagcaaagtcaacgagctggcccagattctccaagaagttgcaaactctgcgagtgatcttcttgcagtggct

SEQ ID NO: 264 - protein, 263 aa, synthetic construct
  REGION 1..263: note = Round 1 (Selectivity)
MVSAHFILIHTICHGAWLWYKLIPLLQSAGHNATAIDLVASGIDPRQLEQIGTWEQYSEPLFTLIESIPEGKKVILVGESGGGINIALAAEKYPEKVSALVFHNALMPDIDHSPAFVYKKFSEVFTDWKDSIFSNYTYGNDTVTAVELGDRTLAENIFSNSPIEDVELIKHLVRKGSFFEQDLDTLPNFTSEGYGSIRRVYVYGEEDQIFSRDFQLWQINNYKPDKVYCVPSADHKIQISKVNELAQILQEVANSASDLLAVA

SEQ ID NO: 265 - DNA, 789 bp, synthetic construct
  misc_feature 1..789: note = Round 1 (Selectivity)
  source 1..789: mol_type = other DNA
atggttagtgcgcattttattctgatccacaccatttgccatggcgcctggctctggtataaactgatcccgttattacagtctgcaggtcataacgctacggcgattgatcttgtggctagcgggatcgaccctcgccaactggaacagattggcacatgggagcagtactcagaaccattgttcaccctgatcgaatcgattccggaaggtaagaaagtcattctggtaggagaatccggtggcggcatcaatattgcactggccgcggagaaatatccggagaaagtgagcgccctcgtctttcacaacgcacttatgcccgatatcgatcacagtccagcgttcgtgtacaagaaatttagccctgttttcactgactggaaagattcgatcttcagcaattatacctacggtaacgacacggttaccgcggtggaattgggagatcgtactctggccgagaacatcttctccaattctccgattgaagatgtagaactggcgaaacatctggtccgcaaaggctccttctttgagcaagacttggataccctgccgaactttacgtcggaagggtatggttcaattcgtcgtgtgtatgtttacggcgaagaagaccagatctttagccgcgattttcagttatggcaaattaataattataagcctgataaagtgtactgtgtaccgagtgctgaccacaagattcagatcagcaaagtcaacgagctggcccagattctccaagaagttgcaaactctgcgagtgatcttcttgcagtggct

SEQ ID NO: 266 - protein, 263 aa, synthetic construct
  REGION 1..263: note = Round 1 (Selectivity)
MVSAHFILIHTICHGAWLWYKLIPLLQSAGHNATAIDLVASGIDPRQLEQIGTWEQYSEPLFTLIESIPEGKKVILVGESGGGINIALAAEKYPEKVSALVFHNALMPDIDHSPAFVYKKFSPVFTDWKDSIFSNYTYGNDTVTAVELGDRTLAENIFSNSPIEDVELAKHLVRKGSFFEQDLDTLPNFTSEGYGSIRRVYVYGEEDQIFSRDFQLWQINNYKPDKVYCVPSADHKIQISKVNELAQILQEVANSASDLLAVA

SEQ ID NO: 267 - DNA, 789 bp, synthetic construct
  misc_feature 1..789: note = Round 1 (Selectivity)
  source 1..789: mol_type = other DNA
atggttagtgcgcattttattctgatccacaccatttgccatggcgcctggctctggtataaactgatcccgttattacagtctgcaggtcataacgctacggcgattgatcttgtggctagcgggatcgaccctcgccaactggaacagattggcacatgggagcagtactcagaaccattgttcaccctgatcgaatcgattccggaaggtaagaaagtcattctggtaggagaatccggtggcggcatcaatattgcactggccgcggagaaatatccggagaaagtgagcgccctcgtctttcacaacgcacttatgcccgatatcgatcacagtccagcgttcgtgtacaagaaatttagcgaagttttcactgactggaaaatgtcgatcttcagcaattatacctacggtaacgacacggttaccgcggtggaattgggagatcgtactctggccgagaacatcttctccaattctccgattgaagatgtagaactggcgaaacatctggtccgcaaaggctccttctttgagcaagacttggataccctgccgaactttacgtcggaagggtatggttcaattcgtcgtgtgtatgtttacggcgaagaagaccagatctttagccgcgattttcagttatggcaaattaataattataagcctgataaagtgtactgtgtaccgagtgctgaccacaagattcagatcagcaaagtcaacgagctggcccagattctccaagaagttgcaaactctgcgagtgatcttcttgcagtggct

SEQ ID NO: 268 - protein, 263 aa, synthetic construct
  REGION 1..263: note = Round 1 (Selectivity)
MVSAHFILIHTICHGAWLWYKLIPLLQSAGHNATAIDLVASGIDPRQLEQIGTWEQYSEPLFTLIESIPEGKKVILVGESGGGINIALAAEKYPEKVSALVFHNALMPDIDHSPAFVYKKFSEVFTDWKMSIFSNYTYGNDTVTAVELGDRTLAENIFSNSPIEDVELAKHLVRKGSFFEQDLDTLPNFTSEGYGSIRRVYVYGEEDQIFSRDFQLWQINNYKPDKVYCVPSADHKIQISKVNELAQILQEVANSASDLLAVA

SEQ ID NO: 269 - DNA, 789 bp, synthetic construct
  misc_feature 1..789: note = Round 1 (Selectivity)
  source 1..789: mol_type = other DNA
atggttagtgcgcattttattctgatccacaccatttgccatggcgcctggctctggtataaactgatcccgttattacagtctgcaggtcataacgctacggcgattgatcttgtggctagcgggatcgaccctcgccaactggaacagattggcacatgggagcagtactcagaaccattgttcaccctgatcgaatcgattccggaaggtaagaaagtcattctggtaggagaatccggtggcggcatccagattgcactggccgcggagaaatatccggagaaagtgagcgccctcgtctttcacaacgcacttatgcccgatatcgatcacagtccagcgttcgtgtacaagaaatttagcgaagttttcactgactggaaagattcgatcttcagcaattatacctacggtaacgacacggttaccgcggtggaattgggagatcgtactctggccgagaacatcttctccaattctccgattgaagatgtagaactggcgaaacatctggtccgcaaaggctccttctttgagcaagacttggataccctgccgaactttacgtcggaagggtatggttcaattcgtcgtgtgtatgtttacggcgaagaagaccagatctttagccgcgattttcagttatggcaaattaataattataagcctgataaagtgtactgtgtaccgagtgctgaccacaagattcagatcagcaaagtcaacgagctggcccagattctccaagaagttgcaaactctgcgagtgatcttcttgcagtggct

SEQ ID NO: 270 - protein, 263 aa, synthetic construct
  REGION 1..263: note = Round 1 (Selectivity)
MVSAHFILIHTICHGAWLWYKLIPLLQSAGHNATAIDLVASGIDPRQLEQIGTWEQYSEPLFTLIESIPEGKKVILVGESGGGIQIALAAEKYPEKVSALVFHNALMPDIDHSPAFVYKKFSEVFTDWKDSIFSNYTYGNDTVTAVELGDRTLAENIFSNSPIEDVELAKHLVRKGSFFEQDLDTLPNFTSEGYGSIRRVYVYGEEDQIFSRDFQLWQINNYKPDKVYCVPSADHKIQISKVNELAQILQEVANSASDLLAVA

SEQ ID NO: 271 - DNA, 789 bp, synthetic construct
  misc_feature 1..789: note = Round 1 (Selectivity)
  source 1..789: mol_type = other DNA
atggttagtgcgcattttattctgatccacaccatttgccatggcgcctggctctggtataaactgatcccgttattacagtctgcaggtcataacgctacggcgattgatcttgtggctagcgggatcgaccctcgccaactggaacagattggcacatgggagcagtactcagaaccattgttcaccctgatcgaatcgattccggaaggtaagaaagtcattctggtaggagaatccggtggcggcatcaatattgcactggccgcggagaaatatccggagaaagtgagcgccctcgtctttcctaacgcacttatgcccgatatcgatcacagtccagcgttcgtgtacaagaaatttagcgaagttttcactgactggaaagattcgatcttcagcaattatacctacggtaacgacacggttaccgcggtggaattgggagatcgtactctggccgagaacatcttctccaattctccgattgaagatgtagaactggcgaaacatctggtccgcaaaggctccttctttgagcaagacttggataccctgccgaactttacgtcggaagggtatggttcaattcgtcgtgtgtatgtttacggcgaagaagaccagatctttagccgcgattttcagttatggcaaattaataattataagcctgataaagtgtactgtgtaccgagtgctgaccacaagattcagatcagcaaagtcaacgagctggcccagattctccaagaagttgcaaactctgcgagtgatcttcttgcagtggct

SEQ ID NO: 272 - protein, 263 aa, synthetic construct
  REGION 1..263: note = Round 1 (Selectivity)
MVSAHFILIHTICHGAWLWYKLIPLLQSAGHNATAIDLVASGIDPRQLEQIGTWEQYSEPLFTLIESIPEGKKVILVGESGGGINIALAAEKYPEKVSALVFPNALMPDIDHSPAFVYKKFSEVFTDWKDSIFSNYTYGNDTVTAVELGDRTLAENIFSNSPIEDVELAKHLVRKGSFFEQDLDTLPNFTSEGYGSIRRVYVYGEEDQIFSRDFQLWQINNYKPDKVYCVPSADHKIQISKVNELAQILQEVANSASDLLAVA

SEQ ID NO: 273 - DNA, 789 bp, synthetic construct
  misc_feature 1..789: note = Round 1 (Selectivity)
  source 1..789: mol_type = other DNA
atggttagtgcgcattttattctgatccacaccatttgccatggcgcctggctctggtataaactgatcccgttattacagtctgcaggtcataacgctacggcgattgatcttgtggctagcgggatcgaccctcgccaactggaacagattggcacaaatgagcagtactcagaaccattgttcaccctgatcgaatcgattccggaaggtaagaaagtcattctggtaggagaatccggtggcggcatcaatattgcactggccgcggagaaatatccggagaaagtgagcgccctcgtctttcacaacgcacttatgcccgatatcgatcacagtccagcgttcgtgtacaagaaatttagcgaagttttcattgactggaaagattcgatcttcagcaattatacctacggtaacgacacggttaccgcggtggaattgggagatcgtactctggccgagaacatcttctccaattctccgattgaagatgtagaactggcgaaacatctggtccgcaaaggctccttctttgagcaagacttggataccctgccgaactttacgtcggaagggtatggttcaattcgtcgtgtgtatgtttacggcgaagaagaccagatctttagccgcgattttcagttatggcaaattaataattataagcctgataaagtgtactgtgtaccgagtgctgaccacaagattcagatcagcaaagtcaacgagctggcccagattctccaagaagttgcaaactctgcgagtgatcttcttgcagtggct

SEQ ID NO: 274 - protein, 263 aa, synthetic construct
  REGION 1..263: note = Round 1 (Selectivity)
MVSAHFILIHTICHGAWLWYKLIPLLQSAGHNATAIDLVASGIDPRQLEQIGTNEQYSEPLFTLIESIPEGKKVILVGESGGGINIALAAEKYPEKVSALVFHNALMPDIDHSPAFVYKKFSEVFIDWKDSIFSNYTYGNDTVTAVELGDRTLAENIFSNSPIEDVELAKHLVRKGSFFEQDLDTLPNFTSEGYGSIRRVYVYGEEDQIFSRDFQLWQINNYKPDKVYCVPSADHKIQISKVNELAQILQEVANSASDLLAVA

SEQ ID NO: 275 - DNA, 789 bp, synthetic construct
  misc_feature 1..789: note = Round 1 (Selectivity)
  source 1..789: mol_type = other DNA
atggttagtgcgcattttattctgatccacaccatttgccatggcgcctggctctggtataaactgatcccgttattacagtctgcaggtcataacgctacggcgattgatcttgtggctagcgggatcgaccctcgccaactggaacagattggcacatgggagcagtactcagaaccattgttcaccctgatcgaatcgattccggaaggtaagaaagtcattctggtaggagaatccggtggcggcatcatgattgcactggccgcggagaaatatccggagaaagtgagcgccctcgtctttcacaacgcacttatgcccgatatcgatcacagtccagcgttcgtgtacaagaaatttagcgaagttttcactgactggaaagattcgatcttcagcaattatacctacggtaacgacacggttaccgcggtggaattgggagatcgtactctggccgagaacatcttctccaattctccgattgaagatgtagaactggcgaaacatctggtccgcaaaggctccttctttgagcaagacttggataccctgccgaactttacgtcggaagggtatggttcaattcgtcgtgtgtatgtttacggcgaagaagaccagatctttagccgcgattttcagttatggcaaattaataattataagcctgataaagtgtactgtgtaccgagtgctgaccacaagattcagatcagcaaagtcaacgagctggcccagattctccaagaagttgcaaactctgcgagtgatcttcttgcagtggct

SEQ ID NO: 276 - protein, 263 aa, synthetic construct
  REGION 1..263: note = Round 1 (Selectivity)
MVSAHFILIHTICHGAWLWYKLIPLLQSAGHNATAIDLVASGIDPRQLEQIGTWEQYSEPLFTLIESIPEGKKVILVGESGGGIMIALAAEKYPEKVSALVFHNALMPDIDHSPAFVYKKFSEVFTDWKDSIFSNYTYGNDTVTAVELGDRTLAENIFSNSPIEDVELAKHLVRKGSFFEQDLDTLPNFTSEGYGSIRRVYVYGEEDQIFSRDFQLWQINNYKPDKVYCVPSADHKIQISKVNELAQILQEVANSASDLLAVA

SEQ ID NO: 277 - DNA, 789 bp, synthetic construct
  misc_feature 1..789: note = Round 1 (Selectivity)
  source 1..789: mol_type = other DNA
atggttagtgcgcattttattctgatccacaccatttgccatggcgcctggctctggtataaactgatcccgttattacagtctgcaggtcataacgctacggcgattgatcttgtggctagcgggatcgaccctcgccaactggaacagattggcacatgggagcagtactcagaaccattgttcaccctgatcgaatcgattccggaaggtaagaaagtcattctggtaggagaatccggtggcggcatcaatattgcactggccgcggagaaatatccggagaaagtgagcgccctcgtctttcacaacgcacttatgcccgatatcgatcacagtccaaagttcgtgtacaagaaatttagcgaagttttcactgactggaaagattcgatcttcagcaattatacctacggtaacgacacggttaccgcggtggaattgggagatcgtactctggccgagaacatcttctccaattctccgattgaagatgtagaactggcgaaacatctggtccgcaaaggctccttctttgagcaagacttggataccctgccgaactttacgtcggaagggtatggttcaattcgtcgtgtgtatgtttacggcgaagaagaccagatctttagccgcgattttcagttatggcaaattaataattataagcctgataaagtgtactgtgtaccgagtgctgaccacaagattcagatcagcaaagtcaacgagctggcccagattctccaagaagttgcaaactctgcgagtgatcttcttgcagtggct

SEQ ID NO: 278 - protein, 263 aa, synthetic construct
  REGION 1..263: note = Round 1 (Selectivity)
MVSAHFILIHTICHGAWLWYKLIPLLQSAGHNATAIDLVASGIDPRQLEQIGTWEQYSEPLFTLIESIPEGKKVILVGESGGGINIALAAEKYPEKVSALVFHNALMPDIDHSPKFVYKKFSEVFTDWKDSIFSNYTYGNDTVTAVELGDRTLAENIFSNSPIEDVELAKHLVRKGSFFEQDLDTLPNFTSEGYGSIRRVYVYGEEDQIFSRDFQLWQINNYKPDKVYCVPSADHKIQISKVNELAQILQEVANSASDLLAVA

SEQ ID NO: 279 - DNA, 789 bp, synthetic construct
  misc_feature 1..789: note = Round 1 (Selectivity)
  source 1..789: mol_type = other DNA
atggttagtgcgcattttattctgatccacaccatttgccatggcgcctggctctggtataaactgatcccgttattacagtctgcaggtcataacgctacggcgattgatcttgtggctagcgggatcgaccctcgccaactggaacagattggcacatgggagcagtactcagaaccattgttcaccctgatcgaatcgattccggaaggtaagaaagtcattctggtaggagaatccggtggcggcatcttgattgcactggccgcggagaaatatccggagaaagtgagcgccctcgtctttcacaacgcacttatgcccgatatcgatcacagtccagcgttcgtgtacaagaaatttagcgaagttttcactgactggaaagattcgatcttcagcaattatacctacggtaacgacacggttaccgcggtggaattgggagatcgtactctggccgagaacatcttctccaattctccgattgaagatgtagaactggcgaaacatctggtccgcaaaggctccttctttgagcaagacttggataccctgccgaactttacgtcggaagggtatggttcaattcgtcgtgtgtatgtttacggcgaagaagaccagatctttagccgcgattttcagttatggcaaattaataattataagcctgataaagtgtactgtgtaccgagtgctgaccacaagattcagatcagcaaagtcaacgagctggcccagattctccaagaagttgcaaactctgcgagtgatcttcttgcagtggct

SEQ ID NO: 280 - protein, 263 aa, synthetic construct
  REGION 1..263: note = Round 1 (Selectivity)
MVSAHFILIHTICHGAWLWYKLIPLLQSAGHNATAIDLVASGIDPRQLEQIGTWEQYSEPLFTLIESIPEGKKVILVGESGGGILIALAAEKYPEKVSALVFHNALMPDIDHSPAFVYKKFSEVFTDWKDSIFSNYTYGNDTVTAVELGDRTLAENIFSNSPIEDVELAKHLVRKGSFFEQDLDTLPNFTSEGYGSIRRVYVYGEEDQIFSRDFQLWQINNYKPDKVYCVPSADHKIQISKVNELAQILQEVANSASDLLAVA

SEQ ID NO: 281 - DNA, 789 bp, synthetic construct
  misc_feature 1..789: note = Round 1 (Selectivity)
  source 1..789: mol_type = other DNA
atggttagtgcgcattttattctgatccacaccatttgccatggcgcctggctctggtataaactgatcccgttattacagtctgcaggtcataacgctacggcgattgatcttgtggctagcgggatcgaccctcgccaactggaacagattggcacatgggagcagtactcagaaccattgttcaccctgatcgaatcgattccggaaggtaagaaagtcattctggtaggagaatccggtggcggcatcaatattgcactggccgcggagaaatatccggagaaagtgagcgccctcgtctttcacaacgcacttatgcccgatatcgatcacagtccagcgttcgtgtacaagaaatttagcgaagttttcactgactggaaagattcgatcttcagcaattatacctacggtaacgacacggttaccgcggtggaattgggagatcgtactctggccgagaacatcttctccaattctccgattgaagatgtagaactggcgaaacatctggtccgcaaaggctccttctttgagcaagacttggataccctgccgaactttacgtcggaagggtatggttcaattcgtcgtgtgtatgtttacggcgaagaagaccagatctttagccgcgattttctgttatggcaaattaataattataagcctgataaagtgtactgtgtaccgagtgctgaccacaagattcagatcagcaaagtcaacgagctggcccagattctccaagaagttgcaaactctgcgagtgatcttcttgcagtggct

SEQ ID NO: 282 - protein, 263 aa, synthetic construct
  REGION 1..263: note = Round 1 (Selectivity)
MVSAHFILIHTICHGAWLWYKLIPLLQSAGHNATAIDLVASGIDPRQLEQIGTWEQYSEPLFTLIESIPEGKKVILVGESGGGINIALAAEKYPEKVSALVFHNALMPDIDHSPAFVYKKFSEVFTDWKDSIFSNYTYGNDTVTAVELGDRTLAENIFSNSPIEDVELAKHLVRKGSFFEQDLDTLPNFTSEGYGSIRRVYVYGEEDQIFSRDFLLWQINNYKPDKVYCVPSADHKIQISKVNELAQILQEVANSASDLLAVA

SEQ ID NO: 283 - DNA, 789 bp, synthetic construct
  misc_feature 1..789: note = Round 1 (Selectivity)
  source 1..789: mol_type = other DNA
atggttagtgcgcattttattctgatccacaccatttgccatggcgcctggctctggtataaactgatcccgttattacagtctgcaggtcataacgctacggcgattgatcttgtggctagcgggatcgaccctcgccaactggaacagattggcacatgggagcagtactcagaaccattgttcaccctgatcgaatcgattccggaaggtaagaaagtcattctggtaggagaatccggtggcggcatcaatattgcactggccgcggagaaatatccggagaaagtgagcgccctcgtctttcacaacgcacttatgcccgatatcgatcacagtccagttttcgtgtacaagaaatttagcgaagttttcactgactggaaagattcgatcttcagcaattatacctacggtaacgacacggttaccgcggtggaattgggagatcgtactctggccgagaacatcttctccaattctccgattgaagatgtagaactggcgaaacatctggtccgcaaaggctccttctttgagcaagacttggataccctgccgaactttacgtcggaagggtatggttcaattcgtcgtgtgtatgtttacggcgaagaagaccagatctttagccgcgattttcagttatggcaaattaataattataagcctgataaagtgtactgtgtaccgagtgctgaccacaagattcagatcagcaaagtcaacgagctggcccagattctccaagaagttgcaaactctgcgagtgatcttcttgcagtggct

SEQ ID NO: 284 - protein, 263 aa, synthetic construct
  REGION 1..263: note = Round 1 (Selectivity)
MVSAHFILIHTICHGAWLWYKLIPLLQSAGHNATAIDLVASGIDPRQLEQIGTWEQYSEPLFTLIESIPEGKKVILVGESGGGINIALAAEKYPEKVSALVFHNALMPDIDHSPVFVYKKFSEVFTDWKDSIFSNYTYGNDTVTAVELGDRTLAENIFSNSPIEDVELAKHLVRKGSFFEQDLDTLPNFTSEGYGSIRRVYVYGEEDQIFSRDFQLWQINNYKPDKVYCVPSADHKIQISKVNELAQILQEVANSASDLLAVA

SEQ ID NO: 285 - DNA, 789 bp, synthetic construct
  misc_feature 1..789: note = Round 1 (Selectivity)
  source 1..789: mol_type = other DNA
atggttagtgcgcattttattctgatccacaccatttgccatggcgcctggctctggtataaactgatcccgttattacagtctgcaggtcataacgctacggcgattgatcttgtggctagcgggatcgaccctcgccaactggaacagattggcacatgggagcagtactcagaaccattgttcaccctgatcgaatcgattccggaaggtaagaaagtcattctggtaggagaatccggtggcggcatcaatattgcactggccgcggagaaatatccggagaaagtgagcgccctcgtctttcacaacgcacttatgcccgatatcgatcacagtccactgttcgtgtacaagaaatttagcgaagttttcactgactggaaagattcgatcttcagcaattatacctacggtaacgacacggttaccgcggtggaattgggagatcgtactctggccgagaacatcttctccaattctccgattgaagatgtagaactggcgaaacatctggtccgcaaaggctccttctttgagcaagacttggataccctgccgaactttacgtcggaagggtatggttcaattcgtcgtgtgtatgtttacggcgaagaagaccagatctttagccgcgattttcagttatggcaaattaataattataagcctgataaagtgtactgtgtaccgagtgctgaccacaagattcagatcagcaaagtcaacgagctggcccagattctccaagaagttgcaaactctgcgagtgatcttcttgcagtggct

SEQ ID NO: 286 - protein, 263 aa, synthetic construct
  REGION 1..263: note = Round 1 (Selectivity)
MVSAHFILIHTICHGAWLWYKLIPLLQSAGHNATAIDLVASGIDPRQLEQIGTWEQYSEPLFTLIESIPEGKKVILVGESGGGINIALAAEKYPEKVSALVFHNALMPDIDHSPLFVYKKFSEVFTDWKDSIFSNYTYGNDTVTAVELGDRTLAENIFSNSPIEDVELAKHLVRKGSFFEQDLDTLPNFTSEGYGSIRRVYVYGEEDQIFSRDFQLWQINNYKPDKVYCVPSADHKIQISKVNELAQILQEVANSASDLLAVA

SEQ ID NO: 287 - DNA, 789 bp, synthetic construct
  misc_feature 1..789: note = Round 1 (Selectivity)
  source 1..789: mol_type = other DNA
atggttagtgcgcattttattctgatccacaccatttgccatggcgcctggctctggtataaactgatcccgttattacagtctgcaggtcataacgctacggcgattgatcttgtggctagcgggatcgaccctcgccaactggaacagattggcacatgggagcagtactcagaaccattgttcaccctgatcgaatcgattccggaaggtaagaaagtcattctggtaggagaatccggtggcggcatcaatattgcactggccgcggagaaatatccggagaaagtgagcgccctcgtctttcacaacgcacttatgcccgatatcgatcacagtccagcgttcgtgtacaagaaatttagcgaagttttcactgactggaaagattcgatcttcagcaattatacctacggtaacgacacggttaccgcggtggaattgggagatcgtccgctggccgagaacatcttctccaattctccgattgaagatgtagaactggcgaaacatctggtccgcaaaggctccttctttgagcaagacttggataccctgccgaactttacgtcggaagggtatggttcaattcgtcgtgtgtatgtttacggcgaagaagaccagatctttagccgcgattttcagttatggcaaattaataattataagcctgataaagtgtactgtgtaccgagtgctgaccacaagattcagatcagcaaagtcaacgagctggcccagattctccaagaagttgcaaactctgcgagtgatcttcttgcagtggct

SEQ ID NO: 288 - protein, 263 aa, synthetic construct
  REGION 1..263: note = Round 1 (Selectivity)
MVSAHFILIHTICHGAWLWYKLIPLLQSAGHNATAIDLVASGIDPRQLEQIGTWEQYSEPLFTLIESIPEGKKVILVGESGGGINIALAAEKYPEKVSALVFHNALMPDIDHSPAFVYKKFSEVFTDWKDSIFSNYTYGNDTVTAVELGDRPLAENIFSNSPIEDVELAKHLVRKGSFFEQDLDTLPNFTSEGYGSIRRVYVYGEEDQIFSRDFQLWQINNYKPDKVYCVPSADHKIQISKVNELAQILQEVANSASDLLAVA

SEQ ID NO: 289 - DNA, 789 bp, synthetic construct
  misc_feature 1..789: note = Round 1 (Selectivity)
  source 1..789: mol_type = other DNA
atggttagtgcgcattttattctgatccacaccatttgccatggcgcctggctctggtataaactgatcccgttattacagtctgcaggtcataacgctacggcgattgatcttgtggctagcgggatcgaccctcgccaactggaacagattggcacatgggagcagaattcagaaccattgttcaccctgatcgaatcgattccggaaggtaagaaagtcattctggtaggagaatccggtggcggcatcaatattgcactggccgcggagaaatatccggagaaagtgagcgccctcgtctttcacaacgcacttatgcccgatatcgatcacagtccagcgttcgtgtacaagaaatttagcgaagttttcactgactggaaagattcgatcttcagcaattatacctacggtaacgacacggttaccgcggtggaattgggagatcgtactctggccgagaacatcttctccaattctccgattgaagatgtagaactggcgaaacatctggtccgcaaaggctccttctttgagcaagacttggataccctgccgaactttacgtcggaagggtatggttcaattcgtcgtgtgtatgtttacggcgaagaagaccagatctttagccgcgattttcagttatggcaaattaataattataagcctgataaagtgtactgtgtaccgagtgctgaccacaagattcagatcagcaaagtcaacgagctggcccagattctccaagaagttgcaaactctgcgagtgatcttcttgcagtggct

SEQ ID NO: 290 - protein, 263 aa, synthetic construct
  REGION 1..263: note = Round 1 (Selectivity)
MVSAHFILIHTICHGAWLWYKLIPLLQSAGHNATAIDLVASGIDPRQLEQIGTWEQNSEPLFTLIESIPEGKKVILVGESGGGINIALAAEKYPEKVSALVFHNALMPDIDHSPAFVYKKFSEVFTDWKDSIFSNYTYGNDTVTAVELGDRTLAENIFSNSPIEDVELAKHLVRKGSFFEQDLDTLPNFTSEGYGSIRRVYVYGEEDQIFSRDFQLWQINNYKPDKVYCVPSADHKIQISKVNELAQILQEVANSASDLLAVA

SEQ ID NO: 291 - DNA, 789 bp, synthetic construct
  misc_feature 1..789: note = Round 1 (Selectivity)
  source 1..789: mol_type = other DNA
atggttagtgcgcattttattctgatcgggaccatttgccatggcgcctggctctggtataaactgatcccgttattacagtctgcaggtcataacgctacggcgattgatcttgtggctagcgggatcgaccctcgccaactggaacagattggcacatgggagcagtactcagaaccattgttcaccctgatcgaatcgattccggaaggtaagaaagtcattctggtaggagaatccggtggcggcatcaatattgcactggccgcggagaaatatccggagaaagtgagcgccctcgtctttcacaacgcacttatgcccgatatcgatcacagtccagcgttcgtgtacaagaaatttagcgaagttttcactgactggaaagattcgatcttcagcaattatacctacggtaacgacacggttaccgcggtggaattgggagatcgtactctggccgagaacatcttctccaattctccgattgaagatgtagaactggcgaaacatctggtccgcaaaggctccttctttgagcaagacttggataccctgccgaactttacgtcggaagggtatggttcaattcgtcgtgtgtatgtttacggcgaagaagaccagatctttagccgcgattttcagttatggcaaattaataattataagcctgataaagtgtactgtgtaccgagtgctgaccacaagattcagatcagcaaagtcaacgagctggcccagattctccaagaagttgcaaactctgcgagtgatcttcttgcagtggct

SEQ ID NO: 292 - protein, 263 aa, synthetic construct
  REGION 1..263: note = Round 1 (Selectivity)
MVSAHFILIGTICHGAWLWYKLIPLLQSAGHNATAIDLVASGIDPRQLEQIGTWEQYSEPLFTLIESIPEGKKVILVGESGGGINIALAAEKYPEKVSALVFHNALMPDIDHSPAFVYKKFSEVFTDWKDSIFSNYTYGNDTVTAVELGDRTLAENIFSNSPIEDVELAKHLVRKGSFFEQDLDTLPNFTSEGYGSIRRVYVYGEEDQIFSRDFQLWQINNYKPDKVYCVPSADHKIQISKVNELAQILQEVANSASDLLAVA

SEQ ID NO: 293 - DNA, 789 bp, synthetic construct
  misc_feature 1..789: note = Round 1 (Selectivity)
  source 1..789: mol_type = other DNA
atggttagtgcgcattttattctgatccacaccatttgccatggcgcctggctctggtataaactgatcccgttattacagtctgcaggtcataacgctacggcgattgatcttgtggctagcgggatcgaccctcgccaactggaacagattggcacatgggagcagtactcagaaccattgttcaccctgatcgaatcgattccggaaggtaagaaagtcattctggtaggagaatccggtggcggcatcaatattgcactggccgcggagaaatatccggagaaagtgagcgccctcgtctttcacaacgcacttatgcccgatatcgatcacagtccagcgttcgtgtacaagaaatttagcgaagttttcactgactggaaagatctgatcttcagcaattatacctacggtaacgacacggttaccgcggtggaattgggagatcgtactctggccgagaacatcttctccaattctccgattgaagatgtagaactggcgaaacatctggtccgcaaaggctccttctttgagcaagacttggataccctgccgaactttacgtcggaagggtatggttcaattcgtcgtgtgtatgtttacggcgaagaagaccagatctttagccgcgattttcagttatggcaaattaataattataagcctgataaagtgtactgtgtaccgagtgctgaccacaagattcagatcagcaaagtcaacgagctggcccagattctccaagaagttgcaaactctgcgagtgatcttcttgcagtggct

SEQ ID NO: 294 - protein, 263 aa, synthetic construct
  REGION 1..263: note = Round 1 (Selectivity)
MVSAHFILIHTICHGAWLWYKLIPLLQSAGHNATAIDLVASGIDPRQLEQIGTWEQYSEPLFTLIESIPEGKKVILVGESGGGINIALAAEKYPEKVSALVFHNALMPDIDHSPAFVYKKFSEVFTDWKDLIFSNYTYGNDTVTAVELGDRTLAENIFSNSPIEDVELAKHLVRKGSFFEQDLDTLPNFTSEGYGSIRRVYVYGEEDQIFSRDFQLWQINNYKPDKVYCVPSADHKIQISKVNELAQILQEVANSASDLLAVA

SEQ ID NO: 295 - DNA, 789 bp, synthetic construct
  misc_feature 1..789: note = Round 1 (Selectivity)
  source 1..789: mol_type = other DNA
atggttagtgcgcattttattctgatccacaccatttgccatggcgcctggctctggtataaactgatcccgttattacagtctgcaggtcataacgctacggcgattgatcttgtggctagcgggatcgaccctcgccaactggaacagattggcacatgggagcagtactcagaaccattgttcaccctgatcgaatcgattccggaaggtaagaaagtcattctggtaggagaatccggtggcggcatcaatattgcactggccgcggagaaatatccggagaaagtgagcgccctcgtctttcacaacgcacttatgcccgatatcgatcacagtccagcgttcgtgtacaagaaatttagcgaagttttcactgactggaaagattcgatcttcagcaattatacctacggtaacgacacggttaccgcggtggaattgggagatcgtactctggccgagaacatcttctccaattctccgattgaagatgtagaactggcgaaacatctggtccgcaaaggctccttctttgagcaagacttggataccctgccgaactttacgtcggaagggtatggttcaattcgtcgtgtgtatgtttacggcgaagaagaccagatcgtgagccgcgattttcagttatggcaaattaataattataagcctgataaagtgtactgtgtaccgagtgctgaccacaagattcagatcagcaaagtcaacgagctggcccagattctccaagaagttgcaaactctgcgagtgatcttcttgcagtggct

SEQ ID NO: 296 - protein, 263 aa, synthetic construct
  REGION 1..263: note = Round 1 (Selectivity)
MVSAHFILIHTICHGAWLWYKLIPLLQSAGHNATAIDLVASGIDPRQLEQIGTWEQYSEPLFTLIESIPEGKKVILVGESGGGINIALAAEKYPEKVSALVFHNALMPDIDHSPAFVYKKFSEVFTDWKDSIFSNYTYGNDTVTAVELGDRTLAENIFSNSPIEDVELAKHLVRKGSFFEQDLDTLPNFTSEGYGSIRRVYVYGEEDQIVSRDFQLWQINNYKPDKVYCVPSADHKIQISKVNELAQILQEVANSASDLLAVA

SEQ ID NO: 297 - DNA, 789 bp, synthetic construct
  misc_feature 1..789: note = Round 1 (Selectivity)
  source 1..789: mol_type = other DNA
atggttagtgcgcattttattctgatccacaccatttgccatggcgcctggctctggtataaactgatcccgttattacagtctgcaggtcataacgctacggcgattgatcttgtggctagcgggatcgaccctcgccaactggaacagattggcacatgggagcagtactcagaaccattgttcaccctgatcgaatcgattccggaaggtaagaaagtcattctggtaggagaatccggtggcggcatcaatattgcactggccgcggagaaatatccggagaaagtgagcgccctcgtctttcacaacgcacttatgcccgatatcgatcacagtccagcgttcgtgtacaagaaatttagcgaagttttcactgactggaaagattcgatcttcagcaattatacctacggtaacgacacggttaccgcggtggaattgggagatcgtactctggccgagaacatcttctccaattctccgattgaagatgtagaactggcgaaacatctggtctgtaaaggctccttctttgagcaagacttggataccctgccgaactttacgtcggaagggtatggttcaattcgtcgtgtgtatgtttacggcgaagaagaccagatctttagccgcgattttcagttatggcaaattaataattataagcctgataaagtgtactgtgtaccgagtgctgaccacaagattcagatcagcaaagtcaacgagctggcccagattctccaagaagttgcaaactctgcgagtgatcttcttgcagtggct

SEQ ID NO: 298 - protein, 263 aa, synthetic construct
  REGION 1..263: note = Round 1 (Selectivity)
MVSAHFILIHTICHGAWLWYKLIPLLQSAGHNATAIDLVASGIDPRQLEQIGTWEQYSEPLFTLIESIPEGKKVILVGESGGGINIALAAEKYPEKVSALVFHNALMPDIDHSPAFVYKKFSEVFTDWKDSIFSNYTYGNDTVTAVELGDRTLAENIFSNSPIEDVELAKHLVCKGSFFEQDLDTLPNFTSEGYGSIRRVYVYGEEDQIFSRDFQLWQINNYKPDKVYCVPSADHKIQISKVNELAQILQEVANSASDLLAVA

SEQ ID NO: 299 - DNA, 789 bp, synthetic construct
  misc_feature 1..789: note = Round 1 (Selectivity)
  source 1..789: mol_type = other DNA
atggttagtgcgcattttattctgatccacaccatttgccatggcgcctggctctggtataaactgatcccgttattacagtctgcaggtcataacgctacggcgattgatcttgtggctagcgggatcgaccctcgccaactggaacagattggtacatgggagcagtactcagaaccattgttcaccctgatcgaatcgattccggaaggtaagaaagtcattctggtaggagaatccggtggcggcatcaatattgcactggccgcggagaaatatccggagaaagtgagcgccctcgtctttcacaacgcacttatgcccgatatcgatcacagtccagcgttcgtgtacaagaaatttagcgaagttttcactgactggaaagattcgatcttcagcaattatacctacggtaacgacacggttaccgcggtggaattgtgggatcgtactctggccgagaacatcttctccaattctccgattgaagatgtagaactggcgaaacatctggtccgcaaaggctccttctttgagcaagacttggataccctgccgaactttacgtcggaagggtatggttcaattcgtcgtgtgtatgtttacggcgaagaagaccagatctttagccgcgattttcagttatggcaaattaataattataagcctgataaagtgtactgtgtaccgagtgctgaccacaagattcagatcagcaaagtcaacgagctggcccagattctccaagaagttgcaaactctgcgagtgatcttcttgcagtggct

SEQ ID NO: 300 - protein, 263 aa, synthetic construct
  REGION 1..263: note = Round 1 (Selectivity)
MVSAHFILIHTICHGAWLWYKLIPLLQSAGHNATAIDLVASGIDPRQLEQIGTWEQYSEPLFTLIESIPEGKKVILVGESGGGINIALAAEKYPEKVSALVFHNALMPDIDHSPAFVYKKFSEVFTDWKDSIFSNYTYGNDTVTAVELWDRTLAENIFSNSPIEDVELAKHLVRKGSFFEQDLDTLPNFTSEGYGSIRRVYVYGEEDQIFSRDFQLWQINNYKPDKVYCVPSADHKIQISKVNELAQILQEVANSASDLLAVA

SEQ ID NO: 301 - DNA, 789 bp, synthetic construct
  misc_feature 1..789: note = Round 1 (Selectivity)
  source 1..789: mol_type = other DNA
atggttagtgcgcattttattctgatccacaccatttgccatggcgcctggacttggtataaactgatcccgttattacagtctgcaggtcataacgctacggcgattgatcttgtggctagcgggatcgaccctcgccaactggaacagattggcacatgggagcagtactcagaaccattgttcaccctgatcgaatcgattccggaaggtaagaaagtcattctggtaggagaatccggtggcggcatcaatattgcactggccgcggagaaatatccggagaaagtgagcgccctcgtctttcacaacgcacttatgcccgatatcgatcacagtccagcgttcgtgtacaagaaatttagcgaagttttcactgactggaaagattcgatcttcagcaattatacctacggtaacgacacggttaccgcggtggaattgggagatcgtactctggccgagaacatcttctccaattctccgattgaagatgtagaactggcgaaacatctggtccgcaaaggctccttctttgagcaagacttggataccctgccgaactttacgtcggaagggtatggttcaattcgtcgtgtgtatgtttacggcgaagaagaccagatctttagccgcgattttcagttatggcaaattaataattataagcctgataaagtgtactgtgtaccgagtgctgaccacaagattcagatcagcaaagtcaacgagctggcccagattctccaagaagttgcaaactctgcgagtgatcttcttgcagtggct

SEQ ID NO: 302 - protein, 263 aa, synthetic construct
  REGION 1..263: note = Round 1 (Selectivity)
MVSAHFILIHTICHGAWTWYKLIPLLQSAGHNATAIDLVASGIDPRQLEQIGTWEQYSEPLFTLIESIPEGKKVILVGESGGGINIALAAEKYPEKVSALVFHNALMPDIDHSPAFVYKKFSEVFTDWKDSIFSNYTYGNDTVTAVELGDRTLAENIFSNSPIEDVELAKHLVRKGSFFEQDLDTLPNFTSEGYGSIRRVYVYGEEDQIFSRDFQLWQINNYKPDKVYCVPSADHKIQISKVNELAQILQEVANSASDLLAVA

SEQ ID NO: 303 - DNA, 789 bp, synthetic construct
  misc_feature 1..789: note = Round 1 (Selectivity)
  source 1..789: mol_type = other DNA
atggttagtgcgcattttattctgatccacaccatttgccatggcgcctggctctggtataaactgatcccgttattacagtctgcaggtcataacgctacggcgattgatcttgtggctagcgggatcgaccctcgccaactggaacagattggcacatgggagcagtactcagaaccattgttcaccctgatcgaatcgattccggaaggtaagaaagtcattctggtaggagaatccggtggcggcatcaatattgcactggccgcggagaaatatccggagaaagtgagcgccctcgtctttcacaacgcacttatgcccgatatcgatcacagtccagcgttcgtgtacaagtgttttagcgaagttttcactgactggaaagattcgatcttcagcaattatacctacggtaacgacacggttaccgcggtggaattgggagatcgtactctggccgagaacatcttctccaattctccgattgaagatgtagaactggcgaaacatctggtccgcaaaggctccttctttgagcaagacttggataccctgccgaactttacgtcggaagggtatggttcaattcgtcgtgtgtatgtttacggcgaagaagaccagatctttagccgcgattttcagttatggcaaattaataattataagcctgataaagtgtactgtgtaccgagtgctgaccacaagattcagatcagcaaagtcaacgagctggcccagattctccaagaagttgcaaactctgcgagtgatcttcttgcagtggct

SEQ ID NO: 304 - protein, 263 aa, synthetic construct
  REGION 1..263: note = Round 1 (Selectivity)
MVSAHFILIHTICHGAWLWYKLIPLLQSAGHNATAIDLVASGIDPRQLEQIGTWEQYSEPLFTLIESIPEGKKVILVGESGGGINIALAAEKYPEKVSALVFHNALMPDIDHSPAFVYKCFSEVFTDWKDSIFSNYTYGNDTVTAVELGDRTLAENIFSNSPIEDVELAKHLVRKGSFFEQDLDTLPNFTSEGYGSIRRVYVYGEEDQIFSRDFQLWQINNYKPDKVYCVPSADHKIQISKVNELAQILQEVANSASDLLAVA

SEQ ID NO: 305 - DNA, 789 bp, synthetic construct
  misc_feature 1..789: note = Round 1 (Selectivity)
  source 1..789: mol_type = other DNA
atggttagtgcgcattttattctgatccacaccatttgccatggcgcctggctctggtataaactgatcccgttattacagtctgcaggtcataacgctacggcgattgatcttgtggctagcgggatcgaccctcgccaactggaacagattggcacatgggagcagtactcagaaccattgttcaccctgatcgaatcgattccggaaggtaagaaagtcattctggtaggagaatccggtggcggcatcaatattgcactggccgcggagaaatatccggagaaagtgagcgccctcgtctttcacaacgcacttatgcccgatatcgatcacagtccagcgttcgtgtacctgaaatttagcgaagttttcactgactggaaagattcgatcttcagcaattatacctacggtaacgacacggttaccgcggtggaattgggagatcgtactctggccgagaacatcttctccaattctccgattgaagatgtagaactggcgaaacatctggtccgcaaaggctccttctttgagcaagacttggataccctgccgaactttacgtcggaagggtatggttcaattcgtcgtgtgtatgtttacggcgaagaagaccagatctttagccgcgattttcagttatggcaaattaataattataagcctgataaagtgtactgtgtaccgagtgctgaccacaagattcagatcagcaaagtcaacgagctggcccagattctccaagaagttgcaaactctgcgagtgatcttcttgcagtggct

SEQ ID NO: 306 - protein, 263 aa, synthetic construct
  REGION 1..263: note = Round 1 (Selectivity)
MVSAHFILIHTICHGAWLWYKLIPLLQSAGHNATAIDLVASGIDPRQLEQIGTWEQYSEPLFTLIESIPEGKKVILVGESGGGINIALAAEKYPEKVSALVFHNALMPDIDHSPAFVYLKFSEVFTDWKDSIFSNYTYGNDTVTAVELGDRTLAENIFSNSPIEDVELAKHLVRKGSFFEQDLDTLPNFTSEGYGSIRRVYVYGEEDQIFSRDFQLWQINNYKPDKVYCVPSADHKIQISKVNELAQILQEVANSASDLLAVA

SEQ ID NO: 307 - DNA, 789 bp, synthetic construct
  misc_feature 1..789: note = Round 1 (Selectivity)
  source 1..789: mol_type = other DNA
atggttagtgcgcattttattctgatccacaccatttgccatggcgcctggctctggtataaactgatcccgttattacagtctgcaggtcataacgctacggcgattgatcttgtggctagcgggatcgaccctcgccaactggaacagattggcacatgggagcagtactcagaaccattgttcaccctgatcgaatcgattccggaaggtaagaaagtcattctggtaggagaatccggtggcggcatcaatattgcactggccgcggagaaatatccggagaaagtgagcgccctcgtctttcacaacgcacttatgcccgatatcgatcacagtccagcgttcgtgtacaagaaatttagcgaagttttcactgactggaaagattcgatcttcagcaattatacctacggtaacgacacggttaccgcggtggaattgggagatcgtactctggccgagaacatcttcttgaattctccgattgaagatgtagaactggcgaaacatctggtccgcaaaggctccttctttgagcaagacttggataccctgccgaactttacgtcggaagggtatggttcaattcgtcgtgtgtatgtttacggcgaagaagaccagatctttagccgcgattttcagttatggcaaattaataattataagcctgataaagtgtactgtgtaccgagtgctgaccacaagattcagatcagcaaagtcaacgagctggcccagattctccaagaagttgcaaactctgcgagtgatcttcttgcagtggct

SEQ ID NO: 308 - protein, 263 aa, synthetic construct
  REGION 1..263: note = Round 1 (Selectivity)
MVSAHFILIHTICHGAWLWYKLIPLLQSAGHNATAIDLVASGIDPRQLEQIGTWEQYSEPLFTLIESIPEGKKVILVGESGGGINIALAAEKYPEKVSALVFHNALMPDIDHSPAFVYKKFSEVFTDWKDSIFSNYTYGNDTVTAVELGDRTLAENIFLNSPIEDVELAKHLVRKGSFFEQDLDTLPNFTSEGYGSIRRVYVYGEEDQIFSRDFQLWQINNYKPDKVYCVPSADHKIQISKVNELAQILQEVANSASDLLAVA

SEQ ID NO: 309 - DNA, 789 bp, synthetic construct
  misc_feature 1..789: note = Round 1 (Selectivity)
  source 1..789: mol_type = other DNA
atggttagtgcgcattttattctgatccacaccatttgccatggcgcctggctctggtataaactgatcccgttattacagtctgcaggtcataacgctacggcgattgatcttgtggttagcgggatcgaccctcgccaactggaacagattggcacatgggagcagtactcagaaccattgttcaccctgatcgaatcgattccggaaggtaagaaagtcattctggtaggagaatccggtggcggcatcaatattgcactggccgcggagaaatatccggagaaagtgagcgccctcgtctttcacaacgcacttatgcccgatatcgatcacagtccagcgttcgtgtacaagaaatttagcgaagttttcactgactggaaagattcgatcttcagcaattatacctacggtaacgacacggttaccgcggtggaattgggagatcgtactctggccgagaacatcttctccaattctccgattgaagatgtagaactggcgaaacatctggtccgcaaaggctccttctttgagcaagacttggataccctgccgaactttacgtcggaagggtatggttcaattcgtcgtgtgtatgtttacggcgaagaagaccagatctttagccgcgattttcagttatggcaaattaataattataagcctgataaagtgtactgtgtaccgagtgctgaccacaagattcagatcagcaaagtcaacgagctggcccagattctccaagaagttgcaaactctgcgagtgatcttcttgcagtggct

SEQ ID NO: 310 - protein, 263 aa, synthetic construct
  REGION 1..263: note = Round 1 (Selectivity)
MVSAHFILIHTICHGAWLWYKLIPLLQSAGHNATAIDLVVSGIDPRQLEQIGTWEQYSEPLFTLIESIPEGKKVILVGESGGGINIALAAEKYPEKVSALVFHNALMPDIDHSPAFVYKKFSEVFTDWKDSIFSNYTYGNDTVTAVELGDRTLAENIFSNSPIEDVELAKHLVRKGSFFEQDLDTLPNFTSEGYGSIRRVYVYGEEDQIFSRDFQLWQINNYKPDKVYCVPSADHKIQISKVNELAQILQEVANSASDLLAVA

SEQ ID NO: 311 - DNA, 789 bp, synthetic construct
  misc_feature 1..789: note = Round 1 (Selectivity)
  source 1..789: mol_type = other DNA
atggttagtgcgcattttattctgatccacaccatttgccatggcgcctggctctggtataaactgatcccgttattacagtctgcaggtcataacgctacggcgattgatcttgtggctagcgggatcgaccctcgccaactggaacagattggcacatgggagcagtactcagaaccattgttcaccctgatcgaatcgattccggaaggtaagaaagtcattctggtaggagaatccggtggcggcatcaatattgcactggccgcggagaaatatccggagaaagtgagcgccctcgtctttcacaacgcacttatgcccgatatcgatcacagtccagcgttcgtgtacaagaaatttagcgaagttttcactgactggaaagattcgatcttcagcaattatacctacggtaacgacacggttaccgcggtggaattgggagatcgtactctggccgagaacatcttctccaattctccgattgaagatgtagaactggcgaaacatctggtccgcaaaggctccttctttgagcaagacttggataccctgccgaactttacgtcggaagggtatggttcaattcgtcgtgtgtatgtttacggcgaagaagacgttatctttagccgcgattttcagttatggcaaattaataattataagcctgataaagtgtactgtgtaccgagtgctgaccacaagattcagatcagcaaagtcaacgagctggcccagattctccaagaagttgcaaactctgcgagtgatcttcttgcagtggct

SEQ ID NO: 312 - protein, 263 aa, synthetic construct
  REGION 1..263: note = Round 1 (Selectivity)
MVSAHFILIHTICHGAWLWYKLIPLLQSAGHNATAIDLVASGIDPRQLEQIGTWEQYSEPLFTLIESIPEGKKVILVGESGGGINIALAAEKYPEKVSALVFHNALMPDIDHSPAFVYKKFSEVFTDWKDSIFSNYTYGNDTVTAVELGDRTLAENIFSNSPIEDVELAKHLVRKGSFFEQDLDTLPNFTSEGYGSIRRVYVYGEEDVIFSRDFQLWQINNYKPDKVYCVPSADHKIQISKVNELAQILQEVANSASDLLAVA

SEQ ID NO: 313 - DNA, 789 bp, synthetic construct
  misc_feature 1..789: note = Round 1 (Selectivity)
  source 1..789: mol_type = other DNA
atggttagtgcgcattttattctgatccacaccatttgccatggcgcctggctctggtataaactgatcccgttattacagtctgcaggtcataacgctacggcgattgatcttgtggctagcgggatcgaccctcgccaactggaacagattggcacatgggagcagtactcagaaccattgttcaccctgatcgaatcgattccggaaggtaagaaagtcattctggtaggagaatccggtggcggcatcgctattgcactggccgcggagaaatatccggagaaagtgagcgccctcgtctttcacaacgcacttatgcccgatatcgatcacagtccagcgttcgtgtacaagaaatttagcgaagttttcactgactggaaagattcgatcttcagcaattatacctacggtaacgacacggttaccgcggtggaattgggagatcgtactctggccgagaacatcttctccaattctccgattgaagatgtagaactggcgaaacatctggtccgcaaaggctccttctttgagcaagacttggataccctgccgaactttacgtcggaagggtatggttcaattcgtcgtgtgtatgtttacggcgaagaagaccagatctttagccgcgattttcagttatggcaaattaataattataagcctgataaagtgtactgtgtaccgagtgctgaccacaagattcagatcagcaaagtcaacgagctggcccagattctccaagaagttgcaaactctgcgagtgatcttcttgcagtggct

SEQ ID NO: 314 - protein, 263 aa, synthetic construct
  REGION 1..263: note = Round 1 (Selectivity)
MVSAHFILIHTICHGAWLWYKLIPLLQSAGHNATAIDLVASGIDPRQLEQIGTWEQYSEPLFTLIESIPEGKKVILVGESGGGIAIALAAEKYPEKVSALVFHNALMPDIDHSPAFVYKKFSEVFTDWKDSIFSNYTYGNDTVTAVELGDRTLAENIFSNSPIEDVELAKHLVRKGSFFEQDLDTLPNFTSEGYGSIRRVYVYGEEDQIFSRDFQLWQINNYKPDKVYCVPSADHKIQISKVNELAQILQEVANSASDLLAVA

SEQ ID NO: 315 - DNA, 789 bp, synthetic construct
  misc_feature 1..789: note = Round 1 (Selectivity)
  source 1..789: mol_type = other DNA
atggttagtgcgcattttattctgatccacaccatttgccatggcgcctggctctggtataaactgatcccgttattacagtctgcaggtcataacgctacggcgattgatcttgtggctagcgggatcgaccctcgccaactggaacagattggcacatgggagcagtactcagaaccattgttcaccctgatcgaatcgattccggaaggtaagaaagtcattctggtaggagaatccggtggcggcatcaatattgcactggccgcggagaaatatccggagaaagtgagcgccctcgtctttcacaacgcacttatgcccgatatcgatcacagtccagcgttcgtgtacaagaaatttagcgaagttttcactgactggaaagattcgatcttcagcaattatacctacggtaacgacacggttaccgcggtggaattgggagatcgtactctggccgagaacatcttccataattctccgattgaagatgtagaactggcgaaacatctggtccgcaaaggctccttctttgagcaagacttggataccctgccgaactttacgtcggaagggtatggttcaattcgtcgtgtgtatgtttacggcgaagaagaccagatctttagccgcgattttcagttatggcaaattaataattataagcctgataaagtgtactgtgtaccgagtgctgaccacaagattcagatcagcaaagtcaacgagctggcccagattctccaagaagttgcaaactctgcgagtgatcttcttgcagtggct

SEQ ID NO: 316 - protein, 263 aa, synthetic construct
  REGION 1..263: note = Round 1 (Selectivity)
MVSAHFILIHTICHGAWLWYKLIPLLQSAGHNATAIDLVASGIDPRQLEQIGTWEQYSEPLFTLIESIPEGKKVILVGESGGGINIALAAEKYPEKVSALVFHNALMPDIDHSPAFVYKKFSEVFTDWKDSIFSNYTYGNDTVTAVELGDRTLAENIFHNSPIEDVELAKHLVRKGSFFEQDLDTLPNFTSEGYGSIRRVYVYGEEDQIFSRDFQLWQINNYKPDKVYCVPSADHKIQISKVNELAQILQEVANSASDLLAVA

SEQ ID NO: 317 - DNA, 789 bp, synthetic construct
  misc_feature 1..789: note = Round 1 (Selectivity)
  source 1..789: mol_type = other DNA
atggttagtgcgcattttattctgatccacaccatttgccatggcgcctggctctggtataaactgatcccgttattacagtctgcaggtcataacgctacggcgattgatcttgtggctagcgggatcgaccctcgccaactggaacagattggcacatgggagcagtactcagaaccattgttcaccctgatcgaatcgattccggaaggtaagaaagtcattctggtaggagaatccggtggcggcatcaatattgcactggccgcggagaaatatccggagaaagtgagcgccctcgtctttcacaacgcacttatgcccgatatcgatcacagtccagcgttcgtgtacaagaaatttagcgaagttttcactgactggaaagattcgatcttcagcaattatacctacggtaacgacacggttaccgcggtggaattgggagatcgtactctggccgagaacatcttctccaattctccgattgaagatgtagaactggcgaaacatctggtccgcaaaggctccttctttggtcaagacttggataccctgccgaactttacgtcggaagggtatggttcaattcgtcgtgtgtatgtttacggcgaagaagaccagatctttagccgcgattttcagttatggcaaattaataattataagcctgataaagtgtactgtgtaccgagtgctgaccacaagattcagatcagcaaagtcaacgagctggcccagattctccaagaagttgcaaactctgcgagtgatcttcttgcagtggct

SEQ ID NO: 318 - protein, 263 aa, synthetic construct
  REGION 1..263: note = Round 1 (Selectivity)
MVSAHFILIHTICHGAWLWYKLIPLLQSAGHNATAIDLVASGIDPRQLEQIGTWEQYSEPLFTLIESIPEGKKVILVGESGGGINIALAAEKYPEKVSALVFHNALMPDIDHSPAFVYKKFSEVFTDWKDSIFSNYTYGNDTVTAVELGDRTLAENIFSNSPIEDVELAKHLVRKGSFFGQDLDTLPNFTSEGYGSIRRVYVYGEEDQIFSRDFQLWQINNYKPDKVYCVPSADHKIQISKVNELAQILQEVANSASDLLAVA

SEQ ID NO: 319 - DNA, 789 bp, synthetic construct
  misc_feature 1..789: note = Round 1 (Selectivity)
  source 1..789: mol_type = other DNA
atggttagtgcgcattttattctgatccacaccatttgccatggcgcctggctctggtataaactgatcccgttattacagtctgcaggtcataacgctacggcgattgatcttgtggctagcgggatcgaccctcgccaactggaacagattggcacatgggagcagtactcagaaccattgttcaccctgatcgaatcgattccggaaggtaagaaagtcattctggtaggagaatccggtggcggcatcaatattgcactggccgcggagaaatatccggagaaagtgagcgccctcgtctttcacaacgcacttatgcccgatatcgatcacagtccagcgttcgtgtacaagaaatttagcgaagttttcactgactggaaagattcgatcttcagcaattatacctacggtaacgacacggttaccgcggtggaattgggagatcgtactctggccgagaacatcctgtccaattctccgattgaagatgtagaactggcgaaacatctggtccgcaaaggctccttctttgagcaagacttggataccctgccgaactttacgtcggaagggtatggttcaattcgtcgtgtgtatgtttacggcgaagaagaccagatctttagccgcgattttcagttatggcaaattaataattataagcctgataaagtgtactgtgtaccgagtgctgaccacaagattcagatcagcaaagtcaacgagctggcccagattctccaagaagttgcaaactctgcgagtgatcttcttgcagtggct

SEQ ID NO: 320 - protein, 263 aa, synthetic construct
  REGION 1..263: note = Round 1 (Selectivity)
MVSAHFILIHTICHGAWLWYKLIPLLQSAGHNATAIDLVASGIDPRQLEQIGTWEQYSEPLFTLIESIPEGKKVILVGESGGGINIALAAEKYPEKVSALVFHNALMPDIDHSPAFVYKKFSEVFTDWKDSIFSNYTYGNDTVTAVELGDRTLAENILSNSPIEDVELAKHLVRKGSFFEQDLDTLPNFTSEGYGSIRRVYVYGEEDQIFSRDFQLWQINNYKPDKVYCVPSADHKIQISKVNELAQILQEVANSASDLLAVA

SEQ ID NO: 321 - DNA, 789 bp, synthetic construct
  misc_feature 1..789: note = Round 1 (Selectivity)
  source 1..789: mol_type = other DNA
atggttagtgcgcattttgttctgattcacacgatttgccatggcgcctggctctggtataaactgatcccgttattacagtctgcaggtcataacgtcacggcgattgatcttgtggctagcgggatcgaccctcgccaactggaacagattggcacatgggagcagtactcagaaccattgttcaccctgatcgaatcgattccggaaggtgagaaagtcattctggtaggagaatccggtggcggcatcaatattgcactggccgcggagaaatatccggagaaaattagcgccctcgtctttcacaacgcacttatgcccgatatcgatcacagtccagcgttcgtgtacaagaaatttagcgaagttttcactgactggaaagattcgatcttcagcaattatacctacggtaacgacacggttaccgcggtggaattgggagatcgtactctggccgagaacatctactccaattctccgattgaagatgtagaactggcgaaacatctggtccgcccaggctccttctttgagcaagacttggataccctgccgaactttacgtcggaagggtatggttcagttcgtcgtgtgtatgtttacggcgaagaagaccagatctttagccgcgattttcagttatggcagattaataattataagcctgataaagtgtactgtgtaccgagtgctgaccacaagcctcagtttagcaaagtcaacgagctggcccagattctccaagaagttgcaaactctgcgagtgatcttcttgcagtggct

SEQ ID NO: 322 - protein, 263 aa, synthetic construct
  REGION 1..263: note = Round 1 (Selectivity)
MVSAHFVLIHTICHGAWLWYKLIPLLQSAGHNVTAIDLVASGIDPRQLEQIGTWEQYSEPLFTLIESIPEGEKVILVGESGGGINIALAAEKYPEKISALVFHNALMPDIDHSPAFVYKKFSEVFTDWKDSIFSNYTYGNDTVTAVELGDRTLAENIYSNSPIEDVELAKHLVRPGSFFEQDLDTLPNFTSEGYGSVRRVYVYGEEDQIFSRDFQLWQINNYKPDKVYCVPSADHKPQFSKVNELAQILQEVANSASDLLAVA

SEQ ID NO: 323 - DNA, 789 bp, synthetic construct
  misc_feature 1..789: note = Round 1 (Selectivity)
  source 1..789: mol_type = other DNA
atggttagtgcgcattttattctgatccacaccatttgccatggcgcctggctgtggtataaactgatcccgttattacagtctgcaggtcataacgtcacggcgattgatcttgtggctagcgggatcgaccctcgccaactggaacagattggcacatgggagcagtactcagaaccattgttcaccctgatcgaatcgctgccggaaggtgagaaagtcattctggtaggagaatccggtggcggcatcaatattgcactggccgcggagaaatatccggagaaaattagcgccctcgtctttcacaacgcacttatgcccgatatcgatcacagtccagcgttcgtgtacaagaaatttagcgaagttttcactgactggaaagattcgatcttcagcaattatacctacggtaacgacacggttaccgcggtggaattgggagatcgtactctggccgagaacatcttctccaattctccgattgaagatgtagaactggcgaaacatctggtccgcaaaggctccttctttgagcaagacttggataccctgccgaactttacgtcggaagggtatggttcaattcgtcgtgtgtatgtttacggcgaagaagaccagatctttagccgcgattttcagttatggcaaattaataattataagcctgataaagtgtactgtgtaccgagtgctgaccacaagcctcagtttagcaaagtcaacgagctggcccagattctccaagaagttgcaaactctgcgagtgatcttcttgcagtggct

SEQ ID NO: 324 - protein, 263 aa, synthetic construct
  REGION 1..263: note = Round 1 (Selectivity)
MVSAHFILIHTICHGAWLWYKLIPLLQSAGHNVTAIDLVASGIDPRQLEQIGTWEQYSEPLFTLIESLPEGEKVILVGESGGGINIALAAEKYPEKISALVFHNALMPDIDHSPAFVYKKFSEVFTDWKDSIFSNYTYGNDTVTAVELGDRTLAENIFSNSPIEDVELAKHLVRKGSFFEQDLDTLPNFTSEGYGSIRRVYVYGEEDQIFSRDFQLWQINNYKPDKVYCVPSADHKPQFSKVNELAQILQEVANSASDLLAVA

SEQ ID NO: 325 - DNA, 789 bp, synthetic construct
  misc_feature 1..789: note = Round 1 (Selectivity)
  source 1..789: mol_type = other DNA
atggttagtgcgcattttattctgatccacaccatttgccatggcgcctggctctggtataaactgatcccgttattacagtctgcaggtcataacgctacggcgattgatcttgtggctagcgggatcgaccctcgccaactggaacagattggcacatgggagcagtactcagaaccattgttcaccctgatcgaatcgattccggaaggtaagaaagtcattctggtaggagaatccggtggcggcatcaatattgcactggccgcggagaaatatccggagaaagtgagcgccctcgtctttcacaacgcacttatgcccgatatcgatcacagtccagcgttcgtgtacaagaaatttagcgaagttttcactgactggaaagattcgatcttcagcaattatacctacggtaacgacacggttaccgcggtggaattgggagatcgtactctggccgagaacatctggtccaattctccgattgaagatgtagaactggcgaaacatctggtccgcaaaggctccttctttgagcaagacttggataccctgccgaactttacgtcggaagggtatggttcaattcgtcgtgtgtatgtttacggcgaagaagaccagatctttagccgcgattttcagttatggcaaattaataattataagcctgataaagtgtactgtgtaccgagtgctgaccacaagattcagatcagcaaagtcaacgagctggcccagattctccaagaagttgcaaactctgcgagtgatcttcttgcagtggct

SEQ ID NO: 326 - protein, 263 aa, synthetic construct
  REGION 1..263: note = Round 1 (Selectivity)
MVSAHFILIHTICHGAWLWYKLIPLLQSAGHNATAIDLVASGIDPRQLEQIGTWEQYSEPLFTLIESIPEGKKVILVGESGGGINIALAAEKYPEKVSALVFHNALMPDIDHSPAFVYKKFSEVFTDWKDSIFSNYTYGNDTVTAVELGDRTLAENIWSNSPIEDVELAKHLVRKGSFFEQDLDTLPNFTSEGYGSIRRVYVYGEEDQIFSRDFQLWQINNYKPDKVYCVPSADHKIQISKVNELAQILQEVANSASDLLAVA

SEQ ID NO: 327 - DNA, 789 bp, synthetic construct
  misc_feature 1..789: note = Round 1 (Selectivity)
  source 1..789: mol_type = other DNA
atggttagtgcgcattttattctggttcacacgatttgccatggcgcctggctctggtataaactgatcccgttattacagtctgcaggtcataacgtcacggcgattgatcttgtggctagcgggatcgaccctcgccaactggaacagattggcacatgggagcagtactcagaaccattgttcaccctgatcgaatcgctgccggaaggtaagaaagtcattctggtaggagaatccggtggcggcatcaatattgcactggccgcggagaaatatccggagaaaattagcgccctcgtctttcacaacgcacttatgcccgatatcgatcacagtccagcgttcgtgtacaagaaatttagcgaagttttcactgactggaaagattcgatcttcagcaattatacctacggtaacgacacggttaccgcggtggaattgggagatcgtactctggccgagaacatcttctccaattctccgattgaagatgtagaactggcgaaacatctggtccgcaaaggctccttctttgagcaagacttggataccctgccgaactttacgtcggaagggtatggttcaattcgtcgtgtgtatgtttacggcgaagaagaccagatctttagccgcgattttcagttatggcaaattaataattataagcctgataaagtgtactgtgtaccgagtgctgaccacaagcctcagtttagcaaagtcaacgagctggcccagattctccaagaagttgcaaactctgcgagtgatcttcttgcagtggct

SEQ ID NO: 328 - protein, 263 aa, synthetic construct
  REGION 1..263: note = Round 1 (Selectivity)
MVSAHFILVHTICHGAWLWYKLIPLLQSAGHNVTAIDLVASGIDPRQLEQIGTWEQYSEPLFTLIESLPEGKKVILVGESGGGINIALAAEKYPEKISALVFHNALMPDIDHSPAFVYKKFSEVFTDWKDSIFSNYTYGNDTVTAVELGDRTLAENIFSNSPIEDVELAKHLVRKGSFFEQDLDTLPNFTSEGYGSIRRVYVYGEEDQIFSRDFQLWQINNYKPDKVYCVPSADHKPQFSKVNELAQILQEVANSASDLLAVA

SEQ ID NO: 329 - DNA, 789 bp, synthetic construct
  misc_feature 1..789: note = Round 1 (Selectivity)
  source 1..789: mol_type = other DNA
atggttagtgcgcattttattctgatccacaccatttgccatggcgcctggctctggtataaactgatcccgttattacagtctgcaggtcataacgctacggcgattgatcttgtggctagcgggatcgaccctcgccaactggaacagcagggcacatgggagcagtactcagaaccattgttcaccctgatcgaatcgattccggaaggtaagaaagtcattctggtaggagaatccggtggcggcatcaatattgcactggccgcggagaaatatccggagaaagtgagcgccctcgtctttcacaacgcacttatgcccgatatcgatcacagtccagcgttcgtgtacaagaaatttagcgaagttttcactgactggaaagattcgatcttcagcaattatacctacggtaacgacacggttaccgcggtggaattgggagatcgtactctggccgagaacatcttctccaattctccgattgaagatgtagaactggcgaaacatctggtccgcaaaggctccttctttgagcaagacttggataccctgccgaactttacgtcggaagggtatggttcaattcgtcgtgtgtatgtttacggcgaagaagaccagatctttagccgcgattttcagttatggcaaattaataattataagcctgataaagtgtactgtgtaccgagtgctgaccacaagattcagatcagcaaagtcaacgagctggcccagattctccaagaagttgcaaactctgcgagtgatcttcttgcagtggct

SEQ ID NO: 330 - protein, 263 aa, synthetic construct
  REGION 1..263: note = Round 1 (Selectivity)
MVSAHFILIHTICHGAWLWYKLIPLLQSAGHNATAIDLVASGIDPRQLEQQGTWEQYSEPLFTLIESIPEGKKVILVGESGGGINIALAAEKYPEKVSALVFHNALMPDIDHSPAFVYKKFSEVFTDWKDSIFSNYTYGNDTVTAVELGDRTLAENIFSNSPIEDVELAKHLVRKGSFFEQDLDTLPNFTSEGYGSIRRVYVYGEEDQIFSRDFQLWQINNYKPDKVYCVPSADHKIQISKVNELAQILQEVANSASDLLAVA

SEQ ID NO: 331 - DNA, 789 bp, synthetic construct
  misc_feature 1..789: note = Round 1 (Selectivity)
  source 1..789: mol_type = other DNA
atggttagtgcgcattttattctgatccacaccatttgccatggcgcctggctctggtataaactgatcccgttattacagtctgcaggtcataacgctacggcgattgatcttgtggctagcgggatcgaccctcgccaactggaacagattggcacatgggagcagtactcagaaccattgttcaccctgatcgaatcgattccggaaggtaagaaagtcattctggtaggagaatccggtggcggcatcaatattgcactggccgcggagaaatatccggagaaagtgagcgccctcgtctttcacaacgcacttatgcccgatatcgatcacagtccagcgttcgtgtacaagaaatttagcgaagttttcactgactggaaagattcgatcttcagcaattatacctacggtaacgacacggttaccgcggtggaattgggagatcgtactctggccgagaacatcttctccaattctccgattgaagatgtagaactggcgaaacatctggtccgcaaaggctccttctttgagcaagacttggataccctgccgaactttacgtcggaagggtatggttcaattcgtcgtgtgtatgtttacggcgaagaagaccagatctttagccgcgattttcagttatggcaaattaataattataagcctgataaagtgtactgtgtaccgagtgctgaccacaagctgcagatcagcaaagtcaacgagctggcccagattctccaagaagttgcaaactctgcgagtgatcttcttgcagtggct

SEQ ID NO: 332 - protein, 263 aa, synthetic construct
  REGION 1..263: note = Round 1 (Selectivity)
MVSAHFILIHTICHGAWLWYKLIPLLQSAGHNATAIDLVASGIDPRQLEQIGTWEQYSEPLFTLIESIPEGKKVILVGESGGGINIALAAEKYPEKVSALVFHNALMPDIDHSPAFVYKKFSEVFTDWKDSIFSNYTYGNDTVTAVELGDRTLAENIFSNSPIEDVELAKHLVRKGSFFEQDLDTLPNFTSEGYGSIRRVYVYGEEDQIFSRDFQLWQINNYKPDKVYCVPSADHKLQISKVNELAQILQEVANSASDLLAVA

SEQ ID NO: 333 - DNA, 789 bp, synthetic construct
  misc_feature 1..789: note = Round 1 (Selectivity)
  source 1..789: mol_type = other DNA
atggttagtgcgcattttattctgatccacaccatttgccatggcgcctggctctggtataaactgatcccgttattacagtctgcaggtcataacgctacggcgattgatcttgtggctagcgggatcgaccctcgccaactggaacagattggcacatgggagcagtactcagaaccattgttcaccctgatcgaatcgattccggaaggtaagaaagtcattctggtaggagaatccggtggcggcatcaatattgcactggccgcggagaaatatccggagaaagtgagcgccctcgtctttcacaacgcacttatgcccgatatcgatcacagtccagcgttcgtgtacaagaaatttagcgaagttttcactgactggaaagattcgatcttcagcaattatacctacggtaacgacacggttaccgcgaatgaattgggagatcgtactctggccgagaacatcttctccaattctccgattgaagatgtagaactggcgaaacatctggtccgcaaaggctccttctttgagcaagacttggataccctgccgaactttacgtcggaagggtatggttcaattcgtcgtgtgtatgtttacggcgaagaagaccagatctttagccgcgattttcagttatggcaaattaataattataagcctgataaagtgtactgtgtaccgagtgctgaccacaagattcagatcagcaaagtcaacgagctggcccagattctccaagaagttgcaaactctgcgagtgatcttcttgcagtggct

SEQ ID NO: 334 - protein, 263 aa, synthetic construct
  REGION 1..263: note = Round 1 (Selectivity)
MVSAHFILIHTICHGAWLWYKLIPLLQSAGHNATAIDLVASGIDPRQLEQIGTWEQYSEPLFTLIESIPEGKKVILVGESGGGINIALAAEKYPEKVSALVFHNALMPDIDHSPAFVYKKFSEVFTDWKDSIFSNYTYGNDTVTANELGDRTLAENIFSNSPIEDVELAKHLVRKGSFFEQDLDTLPNFTSEGYGSIRRVYVYGEEDQIFSRDFQLWQINNYKPDKVYCVPSADHKIQISKVNELAQILQEVANSASDLLAVA

SEQ ID NO: 335 - DNA, 789 bp, synthetic construct
  misc_feature 1..789: note = Round 1 (Selectivity)
  source 1..789: mol_type = other DNA
atggttagtgcgcattttattctgatccacaccatttgccatggcgcctggctctggtataaactgatcccgttattacagtctgcaggtcataacgctacggcgattgatcttgtggctagcgggatcgaccctcgccaactggaacagattggcacatgggagcagtactcagaaccattgttcaccctgatcgaatcgattccggaaggtaagaaagtcattctggtaggagaatccggtggcggcatcaatattgcactggccgcggagaaatatccggagaaagtgagcgccctcgtctttcacaacgcacttatgcccgatatcgatcacagtccagcgttcgtgtacaagaaatttagcgaagttttcactgactggaaagattcgatcttcagcaattatacctacggtaacgacacggttaccccggtggaattgggagatcgtactctggccgagaacatcttctccaattctccgattgaagatgtagaactggcgaaacatctggtccgcaaaggctccttctttgagcaagacttggataccctgccgaactttacgtcggaagggtatggttcaattcgtcgtgtgtatgtttacggcgaagaagaccagatctttagccgcgattttcagttatggcaaattaataattataagcctgataaagtgtactgtgtaccgagtgctgaccacaagattcagatcagcaaagtcaacgagctggcccagattctccaagaagttgcaaactctgcgagtgatcttcttgcagtggct

SEQ ID NO: 336 - protein, 263 aa, synthetic construct
  REGION 1..263: note = Round 1 (Selectivity)
MVSAHFILIHTICHGAWLWYKLIPLLQSAGHNATAIDLVASGIDPRQLEQIGTWEQYSEPLFTLIESIPEGKKVILVGESGGGINIALAAEKYPEKVSALVFHNALMPDIDHSPAFVYKKFSEVFTDWKDSIFSNYTYGNDTVTPVELGDRTLAENIFSNSPIEDVELAKHLVRKGSFFEQDLDTLPNFTSEGYGSIRRVYVYGEEDQIFSRDFQLWQINNYKPDKVYCVPSADHKIQISKVNELAQILQEVANSASDLLAVA

SEQ ID NO: 337 - DNA, 789 bp, synthetic construct
  misc_feature 1..789: note = Round 1 (Selectivity)
  source 1..789: mol_type = other DNA
atggttagtgcgcattttattctgatccacaccatttgccatggcgcctggctctggtataaactgatcccgttattacagtctgcaggtcataacgctacggcgattgatcttgtggctagcgggatcgaccctcgccaactggaacagattggcacatgggagcagtactcagaaccattgttcaccctgatcgaatcgattccggaaggtaagaaagtcattctggtaggagaatccggtggcggcatcaatattgcactggccgcggagaaatatccggagaaagtgagcgccctcgtctttcacaacgcacttatgcccgatatcgatcacagtccagcgttcgtgtacaagaaatttagcgaagttttcactgactggaaagattcgatcttcagcaattatacctacggtaacgacacggttaccgcggtggaattgggagatcgtactctggccgagaacatcttcgggaattctccgattgaagatgtagaactggcgaaacatctggtccgcaaaggctccttctttgagcaagacttggataccctgccgaactttacgtcggaagggtatggttcaattcgtcgtgtgtatgtttacggcgaagaagaccagatctttagccgcgattttcagttatggcaaattaataattataagcctgataaagtgtactgtgtaccgagtgctgaccacaagattcagatcagcaaagtcaacgagctggcccagattctccaagaagttgcaaactctgcgagtgatcttcttgcagtggct

SEQ ID NO: 338 - protein, 263 aa, synthetic construct
  REGION 1..263: note = Round 1 (Selectivity)
MVSAHFILIHTICHGAWLWYKLIPLLQSAGHNATAIDLVASGIDPRQLEQIGTWEQYSEPLFTLIESIPEGKKVILVGESGGGINIALAAEKYPEKVSALVFHNALMPDIDHSPAFVYKKFSEVFTDWKDSIFSNYTYGNDTVTAVELGDRTLAENIFGNSPIEDVELAKHLVRKGSFFEQDLDTLPNFTSEGYGSIRRVYVYGEEDQIFSRDFQLWQINNYKPDKVYCVPSADHKIQISKVNELAQILQEVANSASDLLAVA

SEQ ID NO: 339 - DNA, 789 bp, synthetic construct
  misc_feature 1..789: note = Round 1 (Selectivity)
  source 1..789: mol_type = other DNA
atggttagtgcgcattttattctgatccacaccatttgccatggcgcctggctctggtataaactgatcccgttattacagtctgcaggtcataacgctacggcgattgatcttgtggctagcgggatcgaccctcgccaactggaacagattggcacatgggagcagtactcagaaccattgttcaccctgatcgaatcgattccggaaggtaagaaagtcattctggtaggagaatccggtggcggcatcaatattgcactggccgcggagaaatatccggagaaagtgagcgccctcgtctttcacgctgcacttatgcccgatatcgatcacagtccagcgttcgtgtacaagaaatttagcgaagttttcactgactggaaagattcgatcttcagcaattatacctacggtaacgacacggttaccgcggtggaattgggagatcgtactctggccgagaacatcttctccaattctccgattgaagatgtagaactggcgaaacatctggtccgcaaaggctccttctttgagcaagacttggataccctgccgaactttacgtcggaagggtatggttcaattcgtcgtgtgtatgtttacggcgaagaagaccagatctttagccgcgattttcagttatggcaaattaataattataagcctgataaagtgtactgtgtaccgagtgctgaccacaagattcagatcagcaaagtcaacgagctggcccagattctccaagaagttgcaaactctgcgagtgatcttcttgcagtggct

SEQ ID NO: 340 - protein, 263 aa, synthetic construct
  REGION 1..263: note = Round 1 (Selectivity)
MVSAHFILIHTICHGAWLWYKLIPLLQSAGHNATAIDLVASGIDPRQLEQIGTWEQYSEPLFTLIESIPEGKKVILVGESGGGINIALAAEKYPEKVSALVFHAALMPDIDHSPAFVYKKFSEVFTDWKDSIFSNYTYGNDTVTAVELGDRTLAENIFSNSPIEDVELAKHLVRKGSFFEQDLDTLPNFTSEGYGSIRRVYVYGEEDQIFSRDFQLWQINNYKPDKVYCVPSADHKIQISKVNELAQILQEVANSASDLLAVA

SEQ ID NO: 341 - DNA, 789 bp, synthetic construct
  misc_feature 1..789: note = Round 1 (Selectivity)
  source 1..789: mol_type = other DNA
atggttagtgcgcattttattctgatccacaccatttgccatggcgcctggctctggtataaactgatcccgttattacagtctgcaggtcataacgctacggcgattgatcttgtggctagcgggatcgaccctcgccaactggaacagattggcacatgggagcagtactcagaaccattgttcaccctgatcgaatcgattccggaaggtaagaaagtcattctggtaggagaatccggtggcggcatcaatattgcactggccgcggagaaatatccggagaaagtgagcgccctcgtctttcacaacgcacttatgcccgatatcgatcacagtccagcgttcgtgtacaagaaatttagcgaagttttcactgactggaaagattcgatcttcagcaattatacctacggtaacgacacggttaccgcggtggaattgggagatcgtactctggccgagaacatcttctccaattctccgattgaagatgtagaactggcgaaacatctggtccgcaaaggctccttctttgagcaagacttggataccctgccgaactttacgtcggaagggtatggttcaattcgtcgtgtgtatgtttacggcgaagaagactgtatctttagccgcgattttcagttatggcaaattaataattataagcctgataaagtgtactgtgtaccgagtgctgaccacaagattcagatcagcaaagtcaacgagctggcccagattctccaagaagttgcaaactctgcgagtgatcttcttgcagtggct

SEQ ID NO: 342 - protein, 263 aa, synthetic construct
  REGION 1..263: note = Round 1 (Selectivity)
MVSAHFILIHTICHGAWLWYKLIPLLQSAGHNATAIDLVASGIDPRQLEQIGTWEQYSEPLFTLIESIPEGKKVILVGESGGGINIALAAEKYPEKVSALVFHNALMPDIDHSPAFVYKKFSEVFTDWKDSIFSNYTYGNDTVTAVELGDRTLAENIFSNSPIEDVELAKHLVRKGSFFEQDLDTLPNFTSEGYGSIRRVYVYGEEDCIFSRDFQLWQINNYKPDKVYCVPSADHKIQISKVNELAQILQEVANSASDLLAVA

SEQ ID NO: 343 - DNA, 789 bp, synthetic construct
  misc_feature 1..789: note = Round 1 (Selectivity)
  source 1..789: mol_type = other DNA
atggttagtgcgcattttattctgatccacaccatttgccatggcgcctggctctggtataaactgatcccgttattacagtctgcaggtcataacgctacggcgattgatcttgtggctagcgggatcgaccctcgccaactggaacagattggcacatgggagcagtactcagaaccattgttcaccctgatcgaatcgattccggaaggtaagaaagtcattctggtaggagaatccggtggcggcatcaatattgcactggccgcggagaaatatccggagaaagtgagcgccctcgtctttcacaacgcacttatgcccgatatcgatcacagtccagcgttctgttacaagaaatttagcgaagttttcactgactggaaagattcgatcttcagcaattatacctacggtaacgacacggttaccgcggtggaattgggagatcgtactctggccgagaacatcttctccaattctccgattgaagatgtagaactggcgaaacatctggtccgcaaaggctccttctttgagcaagacttggataccctgccgaactttacgtcggaagggtatggttcaattcgtcgtgtgtatgtttacggcgaagaagaccagatctttagccgcgattttcagttatggcaaattaataattataagcctgataaagtgtactgtgtaccgagtgctgaccacaagattcagatcagcaaagtcaacgagctggcccagattctccaagaagttgcaaactctgcgagtgatcttcttgcagtggct

SEQ ID NO: 344 - protein, 263 aa, synthetic construct
  REGION 1..263: note = Round 1 (Selectivity)
MVSAHFILIHTICHGAWLWYKLIPLLQSAGHNATAIDLVASGIDPRQLEQIGTWEQYSEPLFTLIESIPEGKKVILVGESGGGINIALAAEKYPEKVSALVFHNALMPDIDHSPAFCYKKFSEVFTDWKDSIFSNYTYGNDTVTAVELGDRTLAENIFSNSPIEDVELAKHLVRKGSFFEQDLDTLPNFTSEGYGSIRRVYVYGEEDQIFSRDFQLWQINNYKPDKVYCVPSADHKIQISKVNELAQILQEVANSASDLLAVA

SEQ ID NO: 345 - DNA, 789 bp, synthetic construct
  misc_feature 1..789: note = Round 1 (Selectivity)
  source 1..789: mol_type = other DNA
atggttagtgcgcattttattctgatccacaccatttgccatggcgcctggctctggtataaactgatcccgttattacagtctgcaggtcataacgctacggcgattgatcttgtggctagcgggatcgaccctcgccaactggaacagattggcacatgggagcagtactcagaaccattgttcaccctgatcgaatcgattccggaaggtaagaaagtcattctggtaggagaatccggtggcggcatcaatattgcactggccgcggagaaatatccggagaaagtgagcgccctcgtctttcacaacgcacttatgcccgatatcgatcacagtccagcgttcgtgtacaagaaatttagcgaagttttcactgactggaaagattcgatcttcagcaattatacctacggtaacgacacggttaccgcggtggaattgggagatcgtactctggccgagaacatcttctccaattctccgattgaagatgtagaactggcgaaacatctggtccgcaaaggctccttctttgagcaagacttggataccctgccgaactttacgtcggaagggtatggttcaattcgtcgtgtgtatgtttacggcgaagaagacgggatctttagccgcgattttcagttatggcaaattaataattataagcctgataaagtgtactgtgtaccgagtgctgaccacaagattcagatcagcaaagtcaacgagctggcccagattctccaagaagttgcaaactctgcgagtgatcttcttgcagtggct

SEQ ID NO: 346 - protein, 263 aa, synthetic construct
  REGION 1..263: note = Round 1 (Selectivity)
MVSAHFILIHTICHGAWLWYKLIPLLQSAGHNATAIDLVASGIDPRQLEQIGTWEQYSEPLFTLIESIPEGKKVILVGESGGGINIALAAEKYPEKVSALVFHNALMPDIDHSPAFVYKKFSEVFTDWKDSIFSNYTYGNDTVTAVELGDRTLAENIFSNSPIEDVELAKHLVRKGSFFEQDLDTLPNFTSEGYGSIRRVYVYGEEDGIFSRDFQLWQINNYKPDKVYCVPSADHKIQISKVNELAQILQEVANSASDLLAVA

SEQ ID NO: 347 - DNA, 789 bp, synthetic construct
  misc_feature 1..789: note = Round 1 (Selectivity)
  source 1..789: mol_type = other DNA
atggttagtgcgcattttattctgatccacaccatttgccatggcgcctggctctggtataaactgatcccgttattacagtctgcaggtcataacgctacggcgattgatcttgtggctagcgggatcgaccctcgccaactggaacagattggcacatgggagcagtactcagaaccattgttcaccctgatcgaatcgattccggaaggtaagaaagtcattctggtaggagaatccggtggcggcatcaatattgcactggccgcggagaaatatccggagaaagtgagcgccctcgtctttcacaacgcacttatgcccgatatcgatcacagtccagcgttcgtgtacaagaaatttagcgaagttttcactgactggaaagattcgatcttcagcaattatacctacggtaacgacacggttaccgcggtggaattgggagatcgtactctggccgagaacatcttctccaattctccgattgaagatgtagaactggcgaaacatctggtccgcaaaggctccttctttgagcaagacttggataccctgccgaactttacgtcggaagggtatggttcaattcgtcgtgtgtatgtttacggcgaagaagacacgatctttagccgcgattttcagttatggcaaattaataattataagcctgataaagtgtactgtgtaccgagtgctgaccacaagattcagatcagcaaagtcaacgagctggcccagattctccaagaagttgcaaactctgcgagtgatcttcttgcagtggct

SEQ ID NO: 348 - protein, 263 aa, synthetic construct
  REGION 1..263: note = Round 1 (Selectivity)
MVSAHFILIHTICHGAWLWYKLIPLLQSAGHNATAIDLVASGIDPRQLEQIGTWEQYSEPLFTLIESIPEGKKVILVGESGGGINIALAAEKYPEKVSALVFHNALMPDIDHSPAFVYKKFSEVFTDWKDSIFSNYTYGNDTVTAVELGDRTLAENIFSNSPIEDVELAKHLVRKGSFFEQDLDTLPNFTSEGYGSIRRVYVYGEEDTIFSRDFQLWQINNYKPDKVYCVPSADHKIQISKVNELAQILQEVANSASDLLAVA

SEQ ID NO: 349 - DNA, 789 bp, synthetic construct
  misc_feature 1..789: note = Round 1 (Selectivity)
  source 1..789: mol_type = other DNA
atggttagtgcgcattttattctgatccacaccatttgccatggcgcctggctctggtataaactgatcccgttattacagtctgcaggtcataacgctacggcgattgatcttgtggctagcgggatcgaccctcgccaactggaacagattggcacatgggagcagtactcagaaccattgttcaccctgatcgaatcgattccggaaggtaagaaagtcattctggtaggagaatccggtggcggcatcaatattgcactggccgcggagaaatatccggagaaagtgagcgccctcgtctttcacaacgcacttatgcccgatatcgatcacagtccatgtttcgtgtacaagaaatttagcgaagttttcactgactggaaagattcgatcttcagcaattatacctacggtaacgacacggttaccgcggtggaattgggagatcgtactctggccgagaacatcttctccaattctccgattgaagatgtagaactggcgaaacatctggtccgcaaaggctccttctttgagcaagacttggataccctgccgaactttacgtcggaagggtatggttcaattcgtcgtgtgtatgtttacggcgaagaagaccagatctttagccgcgattttcagttatggcaaattaataattataagcctgataaagtgtactgtgtaccgagtgctgaccacaagattcagatcagcaaagtcaacgagctggcccagattctccaagaagttgcaaactctgcgagtgatcttcttgcagtggct

SEQ ID NO: 350 - protein, 263 aa, synthetic construct
  REGION 1..263: note = Round 1 (Selectivity)
MVSAHFILIHTICHGAWLWYKLIPLLQSAGHNATAIDLVASGIDPRQLEQIGTWEQYSEPLFTLIESIPEGKKVILVGESGGGINIALAAEKYPEKVSALVFHNALMPDIDHSPCFVYKKFSEVFTDWKDSIFSNYTYGNDTVTAVELGDRTLAENIFSNSPIEDVELAKHLVRKGSFFEQDLDTLPNFTSEGYGSIRRVYVYGEEDQIFSRDFQLWQINNYKPDKVYCVPSADHKIQISKVNELAQILQEVANSASDLLAVA

SEQ ID NO: 351 - DNA, 789 bp, synthetic construct
  misc_feature 1..789: note = Round 1 (Selectivity)
  source 1..789: mol_type = other DNA
atggttagtgcgcattttattctgatccacaccatttgccatggcgcctggctctggtataaactgatcccgttattacagtctgcaggtcataacgctacggcgattgatcttgtggctagcgggatcgaccctcgccaactggaacagattggcacatgggagcagtactcagaaccattgttcaccctgatcgaatcgattccggaaggtaagaaagtcattctggtaggagaatccggtggcggcatcaatattgcactggccgcggagaaatatccggagaaagtgagcgccctcgtctttcacaacgcacttatgcccgatatcgatcacagtccagcgttcgtgtacaagaaatttagcgaagttttcactgactggaaagattcgatcttcagcaattatacctacggtaacgacacggttaccgcggtggaaccgggagatcgtactctggccgagaacatcttctccaattctccgattgaagatgtagaactggcgaaacatctggtccgcaaaggctccttctttgagcaagacttggataccctgccgaactttacgtcggaagggtatggttcaattcgtcgtgtgtatgtttacggcgaagaagaccagatctttagccgcgattttcagttatggcaaattaataattataagcctgataaagtgtactgtgtaccgagtgctgaccacaagattcagatcagcaaagtcaacgagctggcccagattctccaagaagttgcaaactctgcgagtgatcttcttgcagtggct

SEQ ID NO: 352 - protein, 263 aa, synthetic construct
  REGION 1..263: note = Round 1 (Selectivity)
MVSAHFILIHTICHGAWLWYKLIPLLQSAGHNATAIDLVASGIDPRQLEQIGTWEQYSEPLFTLIESIPEGKKVILVGESGGGINIALAAEKYPEKVSALVFHNALMPDIDHSPAFVYKKFSEVFTDWKDSIFSNYTYGNDTVTAVEPGDRTLAENIFSNSPIEDVELAKHLVRKGSFFEQDLDTLPNFTSEGYGSIRRVYVYGEEDQIFSRDFQLWQINNYKPDKVYCVPSADHKIQISKVNELAQILQEVANSASDLLAVA

SEQ ID NO: 353 - DNA, 789 bp, synthetic construct
  misc_feature 1..789: note = Round 1 (Selectivity)
  source 1..789: mol_type = other DNA
atggttagtgcgcattttattctgatccacaccatttgccatggcgcctggctctggtataaactgatcccgttattacagtctgcaggtcataacgctacggcgattgatcttgtgacgagcgggatcgaccctcgccaactggaacagattggcacatgggagcagtactcagaaccattgttcaccctgatcgaatcgattccggaaggtaagaaagtcattctggtaggagaatccggtggcggcatcaatattgcactggccgcggagaaatatccggagaaagtgagcgccctcgtctttcacaacgcacttatgcccgatatcgatcacagtccagcgttcgtgtacaagaaatttagcgaagttttcactgactggaaagattcgatcttcagcaattatacctacggtaacgacacggttaccgcggtggaattgggagatcgtactctggccgagaacatcttctccaattctccgattgaagatgtagaactggcgaaacatctggtccgcaaaggctccttctttgagcaagacttggataccctgccgaactttacgtcggaagggtatggttcaattcgtcgtgtgtatgtttacggcgaagaagaccagatctttagccgcgattttcagttatggcaaattaataattataagcctgataaagtgtactgtgtaccgagtgctgaccacaagattcagatcagcaaagtcaacgagctggcccagattctccaagaagttgcaaactctgcgagtgatcttcttgcagtggct

SEQ ID NO: 354 - protein, 263 aa, synthetic construct
  REGION 1..263: note = Round 1 (Selectivity)
MVSAHFILIHTICHGAWLWYKLIPLLQSAGHNATAIDLVTSGIDPRQLEQIGTWEQYSEPLFTLIESIPEGKKVILVGESGGGINIALAAEKYPEKVSALVFHNALMPDIDHSPAFVYKKFSEVFTDWKDSIFSNYTYGNDTVTAVELGDRTLAENIFSNSPIEDVELAKHLVRKGSFFEQDLDTLPNFTSEGYGSIRRVYVYGEEDQIFSRDFQLWQINNYKPDKVYCVPSADHKIQISKVNELAQILQEVANSASDLLAVA

SEQ ID NO: 355 - DNA, 789 bp, synthetic construct
  misc_feature 1..789: note = Round 1 (Selectivity)
  source 1..789: mol_type = other DNA
atggttagtgcgcattttattctgatccacaccatttgccatggcgcctggctctggtataaactgatcccgttattacagtctgcaggtcataacgctacggcgattgatcttgtggctagcgggatcgaccctcgccaactggaacagattggcacatgggagcagtactcagaaccattgttcaccctgatcgaatcgattccggaaggtaagaaagtcattctggtaggagaatccggtggcggcatcaatattgcactggccgcggagaaatatccggagaaagtgagcgccctcgtctttcacaacgcacttatgcccgatatcgatcacagtccagcgttcgtgtacaagaaatttagcgaagttttcactgactggaaagattcgatcttctggaattatacctacggtaacgacacggttaccgcggtggaattgggagatcgtactctggccgagaacatcttctccaattctccgattgaagatgtagaactggcgaaacatctggtccgcaaaggctccttctttgagcaagacttggataccctgccgaactttacgtcggaagggtatggttcaattcgtcgtgtgtatgtttacggcgaagaagaccagatctttagccgcgattttcagttatggcaaattaataattataagcctgataaagtgtactgtgtaccgagtgctgaccacaagattcagatcagcaaagtcaacgagctggcccagattctccaagaagttgcaaactctgcgagtgatcttcttgcagtggct

SEQ ID NO: 356 - protein, 263 aa, synthetic construct
  REGION 1..263: note = Round 1 (Selectivity)
MVSAHFILIHTICHGAWLWYKLIPLLQSAGHNATAIDLVASGIDPRQLEQIGTWEQYSEPLFTLIESIPEGKKVILVGESGGGINIALAAEKYPEKVSALVFHNALMPDIDHSPAFVYKKFSEVFTDWKDSIFWNYTYGNDTVTAVELGDRTLAENIFSNSPIEDVELAKHLVRKGSFFEQDLDTLPNFTSEGYGSIRRVYVYGEEDQIFSRDFQLWQINNYKPDKVYCVPSADHKIQISKVNELAQILQEVANSASDLLAVA

SEQ ID NO: 357 - DNA, 789 bp, synthetic construct
  misc_feature 1..789: note = Round 1 (Selectivity)
  source 1..789: mol_type = other DNA
atggttagtgcgcattttattctgatccacaccatttgccatggcgcctggctctggtataaactgatcccgttattacagtctgcaggtcataacgctacggcgattgatcttgtggctagcgggatcgaccctcgccaactggaacagattggcacatgggagcagtactcagaaccattgttcaccctgatcgaatcgattccggaaggtaagaaagtcattctggtaggagaatccggtggcggcatcaatattgcactggccgcggagaaatatccggagaaagtgagcgccctcgtctttcacaacgcacttatgcccgatatcgatcacagtccagcgttcgtgtacaagaaatttagcgaagttttcactgactggaaagattcgatcttcagcaattatatttacggtaacgacacggttaccgtggtggaattgggagatcgtactctggccgagaacatcttctccaattctccgattgaagatgtagaactggcgaaacatctggtccgcaaaggctccttctttgagcaagacttggataccctgccgaactttacgtcggaagggtatggttcaattcgtcgtgtgtatgtttacggcgaagaagaccagatctttagccgcgattttcagttatggcaaattaataattataagcctgataaagtgtactgtgtaccgagtgctgaccacaagattcagatcagcaaagtcaacgagctggcccagattctccaagaagttgcaaactctgcgagtgatcttcttgcagtggct

SEQ ID NO: 358 - protein, 263 aa, synthetic construct
  REGION 1..263: note = Round 1 (Selectivity)
MVSAHFILIHTICHGAWLWYKLIPLLQSAGHNATAIDLVASGIDPRQLEQIGTWEQYSEPLFTLIESIPEGKKVILVGESGGGINIALAAEKYPEKVSALVFHNALMPDIDHSPAFVYKKFSEVFTDWKDSIFSNYIYGNDTVTVVELGDRTLAENIFSNSPIEDVELAKHLVRKGSFFEQDLDTLPNFTSEGYGSIRRVYVYGEEDQIFSRDFQLWQINNYKPDKVYCVPSADHKIQISKVNELAQILQEVANSASDLLAVA

SEQ ID NO: 359 - DNA, 789 bp, synthetic construct
  misc_feature 1..789: note = Round 1 (Selectivity)
  source 1..789: mol_type = other DNA
atggttagtgcgcattttattctgatcccgaccatttgccatggcgcctggctctggtataaactgatcccgttattacagtctgcaggtcataacgctacggcgattgatcttgtggctagcgggatcgaccctcgccaactggaacagattggcacatgggagcagtactcagaaccattgttcaccctgatcgaatcgattccggaaggtaagaaagtcattctggtaggagaatccggtggcggcatcaatattgcactggccgcggagaaatatccggagaaagtgagcgccctcgtctttcacaacgcacttatgcccgatatcgatcacagtccagcgttcgtgtacaagaaatttagcgaagttttcactgactggaaagattcgatcttcagcaattatacctacggtaacgacacggttaccgcggtggaattgggagatcgtactctggccgagaacatcttctccaattctccgattgaagatgtagaactggcgaaacatctggtccgcaaaggctccttctttgagcaagacttggataccctgccgaactttacgtcggaagggtatggttcaattcgtcgtgtgtatgtttacggcgaagaagaccagatctttagccgcgattttcagttatggcaaattaataattataagcctgataaagtgtactgtgtaccgagtgctgaccacaagattcagatcagcaaagtcaacgagctggcccagattctccaagaagttgcaaactctgcgagtgatcttcttgcagtggct

SEQ ID NO: 360 - protein, 263 aa, synthetic construct
  REGION 1..263: note = Round 1 (Selectivity)
MVSAHFILIPTICHGAWLWYKLIPLLQSAGHNATAIDLVASGIDPRQLEQIGTWEQYSEPLFTLIESIPEGKKVILVGESGGGINIALAAEKYPEKVSALVFHNALMPDIDHSPAFVYKKFSEVFTDWKDSIFSNYTYGNDTVTAVELGDRTLAENIFSNSPIEDVELAKHLVRKGSFFEQDLDTLPNFTSEGYGSIRRVYVYGEEDQIFSRDFQLWQINNYKPDKVYCVPSADHKIQISKVNELAQILQEVANSASDLLAVA

SEQ ID NO: 361 - DNA, 789 bp, synthetic construct
  misc_feature 1..789: note = Round 1 (Selectivity)
  source 1..789: mol_type = other DNA
atggttagtgcgcattttattctgatccacaccatttgccatggcgcctggctctggtataaactgatcccgttattacagtctgcaggtcataacgctacggcgattgatcttgtggctagcgggatcgaccctcgccaactggaacaggctggcacatgggagcagtactcagaaccattgttcaccctgatcgaatcgattccggaaggtaagaaagtcattctggtaggagaatccggtggcggcatcaatattgcactggccgcggagaaatatccggagaaagtgagcgccctcgtctttcacaacgcacttatgcccgatatcgatcacagtccagcgttcgtgtacaagaaatttagcgaagttttcactgactggaaagattcgatcttcagcaattatacctacggtaacgacacggttaccgcggtggaattgggagatcgtactctggccgagaacatcttctccaattctccgattgaagatgtagaactggcgaaacatctggtccgcaaaggctccttctttgagcaagacttggataccctgccgaactttacgtcggaagggtatggttcaattcgtcgtgtgtatgtttacggcgaagaagaccagatctttagccgcgattttcagttatggcaaattaataattataagcctgataaagtgtactgtgtaccgagtgctgaccacaagattcagatcagcaaagtcaacgagctggcccagattctccaagaagttgcaaactctgcgagtgatcttcttgcagtggct

SEQ ID NO: 362 - protein, 263 aa, synthetic construct
  REGION 1..263: note = Round 1 (Selectivity)
MVSAHFILIHTICHGAWLWYKLIPLLQSAGHNATAIDLVASGIDPRQLEQAGTWEQYSEPLFTLIESIPEGKKVILVGESGGGINIALAAEKYPEKVSALVFHNALMPDIDHSPAFVYKKFSEVFTDWKDSIFSNYTYGNDTVTAVELGDRTLAENIFSNSPIEDVELAKHLVRKGSFFEQDLDTLPNFTSEGYGSIRRVYVYGEEDQIFSRDFQLWQINNYKPDKVYCVPSADHKIQISKVNELAQILQEVANSASDLLAVA

SEQ ID NO: 363 - DNA, 789 bp, synthetic construct
  misc_feature 1..789: note = Round 1 (Selectivity)
  source 1..789: mol_type = other DNA
atggttagtgcgcattttattctgatccacaccatttgccatggcgcctggagttggtataaactgatcccgttattacagtctgcaggtcataacgctacggcgattgatcttgtggctagcgggatcgaccctcgccaactggaacagattggcacatgggagcagtactcagaaccattgttcaccctgatcgaatcgattccggaaggtaagaaagtcattctggtaggagaatccggtggcggcatcaatattgcactggccgcggagaaatatccggagaaagtgagcgccctcgtctttcacaacgcacttatgcccgatatcgatcacagtccagcgttcgtgtacaagaaatttagcgaagttttcactgactggaaagattcgatcttcagcaattatacctacggtaacgacacggttaccgcggtggaattgggagatcgtactctggccgagaacatcttctccaattctccgattgaagatgtagaactggcgaaacatctggtccgcaaaggctccttctttgagcaagacttggataccctgccgaactttacgtcggaagggtatggttcaattcgtcgtgtgtatgtttacggcgaagaagaccagatctttagccgcgattttcagttatggcaaattaataattataagcctgataaagtgtactgtgtaccgagtgctgaccacaagattcagatcagcaaagtcaacgagctggcccagattctccaagaagttgcaaactctgcgagtgatcttcttgcagtggct

SEQ ID NO: 364 - protein, 263 aa, synthetic construct
  REGION 1..263: note = Round 1 (Selectivity)
MVSAHFILIHTICHGAWSWYKLIPLLQSAGHNATAIDLVASGIDPRQLEQIGTWEQYSEPLFTLIESIPEGKKVILVGESGGGINIALAAEKYPEKVSALVFHNALMPDIDHSPAFVYKKFSEVFTDWKDSIFSNYTYGNDTVTAVELGDRTLAENIFSNSPIEDVELAKHLVRKGSFFEQDLDTLPNFTSEGYGSIRRVYVYGEEDQIFSRDFQLWQINNYKPDKVYCVPSADHKIQISKVNELAQILQEVANSASDLLAVA

SEQ ID NO: 365 - DNA, 789 bp, synthetic construct
  misc_feature 1..789: note = Round 1 (Selectivity)
  source 1..789: mol_type = other DNA
atggttagtgcgcattttattctgatccacaccatttgccatggcgcctggctctggtataaactgatcccgttattacagtctgcaggtcataacgctacggcgattgatcttgtggctagcgggatcgaccctcgccaactggaacagagtggcacatgggagcagtactcagaaccattgttcaccctgatcgaatcgattccggaaggtaagaaagtcattctggtaggagaatccggtggcggcatcaatattgcactggccgcggagaaatatccggagaaagtgagcgccctcgtctttcacaacgcacttatgcccgatatcgatcacagtccagcgttcgtgtacaagaaatttagcgaagttttcactgactggaaagattcgatcttcagcaattatacctacggtaacgacacggttaccgcggtggaattgggagatcgtactctggccgagaacatcttctccaattctccgattgaagatgtagaactggcgaaacatctggtccgcaaaggctccttctttgagcaagacttggataccctgccgaactttacgtcggaagggtatggttcaattcgtcgtgtgtatgtttacggcgaagaagaccagatctttagccgcgattttcagttatggcaaattaataattataagcctgataaagtgtactgtgtaccgagtgctgaccacaagattcagatcagcaaagtcaacgagctggcccagattctccaagaagttgcaaactctgcgagtgatcttcttgcagtggct

SEQ ID NO: 366 - protein, 263 aa, synthetic construct
  REGION 1..263: note = Round 1 (Selectivity)
MVSAHFILIHTICHGAWLWYKLIPLLQSAGHNATAIDLVASGIDPRQLEQSGTWEQYSEPLFTLIESIPEGKKVILVGESGGGINIALAAEKYPEKVSALVFHNALMPDIDHSPAFVYKKFSEVFTDWKDSIFSNYTYGNDTVTAVELGDRTLAENIFSNSPIEDVELAKHLVRKGSFFEQDLDTLPNFTSEGYGSIRRVYVYGEEDQIFSRDFQLWQINNYKPDKVYCVPSADHKIQISKVNELAQILQEVANSASDLLAVA

SEQ ID NO: 367 - DNA, 789 bp, synthetic construct
  misc_feature 1..789: note = Round 1 (Selectivity)
  source 1..789: mol_type = other DNA
atggttagtgcgcattttattctgatccacaccatttgccatggcgcctggctctggtataaactgatcccgttattacagtctgcaggtcataacgctacggcgattgatcttgtggctagcgggatcgaccctcgccaactggaacagattggcacatgggagcagtactcagaaccattgttcaccctgatcgaatcgattccggaaggtaagaaagtcattctggtaggagaatccggtggcggcatcaatattgcactggccgcggagaaatatccggagaaagtgagcgccctcgtctttcacaacgcacttatgcccgatatcgatcacagtccagcgttcgtgtacaagaaatttagcgaagttttcactgactggaaagattcgatcttcagcaattatacctacggtaacgacacggttaccgcggtggaattgggagatcgtactctggccgagaacatcttctccaattctccgattgaagatgtagaactggggaaacatctggtccgcaaaggctccttctttgagcaagacttggataccctgccgaactttacgtcggaagggtatggttcaattcgtcgtgtgtatgtttacggcgaagaagaccagatctttagccgcgattttcagttatggcaaattaataattataagcctgataaagtgtactgtgtaccgagtgctgaccacaagattcagatcagcaaagtcaacgagctggcccagattctccaagaagttgcaaactctgcgagtgatcttcttgcagtggct

SEQ ID NO: 368 - protein, 263 aa, synthetic construct
  REGION 1..263: note = Round 1 (Selectivity)
MVSAHFILIHTICHGAWLWYKLIPLLQSAGHNATAIDLVASGIDPRQLEQIGTWEQYSEPLFTLIESIPEGKKVILVGESGGGINIALAAEKYPEKVSALVFHNALMPDIDHSPAFVYKKFSEVFTDWKDSIFSNYTYGNDTVTAVELGDRTLAENIFSNSPIEDVELGKHLVRKGSFFEQDLDTLPNFTSEGYGSIRRVYVYGEEDQIFSRDFQLWQINNYKPDKVYCVPSADHKIQISKVNELAQILQEVANSASDLLAVA

SEQ ID NO: 369 - DNA, 789 bp, synthetic construct
  misc_feature 1..789: note = Round 1 (Selectivity)
  source 1..789: mol_type = other DNA
atggttagtgcgcattttattctgatccacaccatttgccatggcgcctggctctggtataaactgatcccgttattacagtctgcaggtcataacgctacggcgattgatcttgtggctagcgggatcgaccctcgccaactgaggcagattggcacatgggagcagtactcagaaccattgttcaccctgatcgaatcgattccggaaggtaagaaagtcattctggtaggagaatccggtggcggcatcaatattgcactggccgcggagaaatatccggagaaagtgagcgccctcgtctttcacaacgcacttatgcccgatatcgatcacagtccagcgttcgtgtacaagaaatttagcgaagttttcactgactggaaagattcgatcttcagcaattatacctacggtaacgacacggttaccgcggtggaattgggagatcgtactctggccgagaacatcttctccaattctccgattgaagatgtagaactggcgaaacatctggtccgcaaaggctccttctttgagcaagacttggataccctgccgaactttacgtcggaagggtatggttcaattcgtcgtgtgtatgtttacggcgaagaagaccagatctttagccgcgattttcagttatggcaaattaataattataagcctgataaagtgtactgtgtaccgagtgctgaccacaagattcagatcagcaaagtcaacgagctggcccagattctccaagaagttgcaaactctgcgagtgatcttcttgcagtggct

SEQ ID NO: 370 - protein, 263 aa, synthetic construct
  REGION 1..263: note = Round 1 (Selectivity)
MVSAHFILIHTICHGAWLWYKLIPLLQSAGHNATAIDLVASGIDPRQLRQIGTWEQYSEPLFTLIESIPEGKKVILVGESGGGINIALAAEKYPEKVSALVFHNALMPDIDHSPAFVYKKFSEVFTDWKDSIFSNYTYGNDTVTAVELGDRTLAENIFSNSPIEDVELAKHLVRKGSFFEQDLDTLPNFTSEGYGSIRRVYVYGEEDQIFSRDFQLWQINNYKPDKVYCVPSADHKIQISKVNELAQILQEVANSASDLLAVA

SEQ ID NO: 371 - DNA, 789 bp, synthetic construct
  misc_feature 1..789: note = Round 1 (Selectivity)
  source 1..789: mol_type = other DNA
atggttagtgcgcattttattctgatccacaccatttgccatggcgcctggctctggtataaactgatcccgttattacagtctgcaggtcataacgctacggcgattgatcttgtggctagcgggatcgaccctcgccaactggaacagattggcacatgggagcagtactcagaaccattgttcaccctgatcgaatcgattccggaaggtaagaaagtcattctggtaggagaatccggtggcggcatcaatattgcactggccgcggagaaatatccggagaaagtgagcgccctcgtctttcacaacgcacttatgcccgatatcgatcacagtccagcgttcgtgtacaagaaatttagcgaagttttcactgactggaaagattcgatcttcagcaattatacctacggtaacgacacggttaccgcggtggaattgggagatcgtactctggccgagaacatcttctccaattctccgattgaagatgtagaactggcgaaacatctgtatcgcaaaggctccttctttgagcaagacttggataccctgccgaactttacgtcggaagggtatggttcaattcgtcgtgtgtatgtttacggcgaagaagaccagatctttagccgcgattttcagttatggcaaattaataattataagcctgataaagtgtactgtgtaccgagtgctgaccacaagattcagatcagcaaagtcaacgagctggcccagattctccaagaagttgcaaactctgcgagtgatcttcttgcagtggct

SEQ ID NO: 372 - protein, 263 aa, synthetic construct
  REGION 1..263: note = Round 1 (Selectivity)
MVSAHFILIHTICHGAWLWYKLIPLLQSAGHNATAIDLVASGIDPRQLEQIGTWEQYSEPLFTLIESIPEGKKVILVGESGGGINIALAAEKYPEKVSALVFHNALMPDIDHSPAFVYKKFSEVFTDWKDSIFSNYTYGNDTVTAVELGDRTLAENIFSNSPIEDVELAKHLYRKGSFFEQDLDTLPNFTSEGYGSIRRVYVYGEEDQIFSRDFQLWQINNYKPDKVYCVPSADHKIQISKVNELAQILQEVANSASDLLAVA

SEQ ID NO: 373 - DNA, 789 bp, synthetic construct
  misc_feature 1..789: note = Round 1 (Selectivity)
  source 1..789: mol_type = other DNA
atggttagtgcgcattttattctgatccacaccatttgccatggcgcctggctctggtataaactgatcccgttattacagtctgcaggtcataacgctacggcgattgatcttgtggctagcgggatcgaccctcgccaatgggaacagattggcacatgggagcagtactcagaaccattgttcaccctgatcgaatcgattccggaaggtaagaaagtcattctggtaggagaatccggtggcggcatcaatattgcactggccgcggagaaatatccggagaaagtgagcgccctcgtctttcacaacgcacttatgcccgatatcgatcacagtccagcgttcgtgtacaagaaatttagcgaagttttcactgactggaaagattcgatcttcagcaattatacctacggtaacgacacggttaccgcggtggaattgggagatcgtactctggccgagaacatcttctccaattctccgattgaagatgtagaactggcgaaacatctggtccgcaaaggctccttctttgagcaagacttggataccctgccgaactttacgtcggaagggtatggttcaattcgtcgtgtgtatgtttacggcgaagaagaccagatctttagccgcgattttcagttatggcaaattaataattataagcctgataaagtgtactgtgtaccgagtgctgaccacaagattcagatcagcaaagtcaacgagctggcccagattctccaagaagttgcaaactctgcgagtgatcttcttgcagtggct

SEQ ID NO: 374 - protein, 263 aa, synthetic construct
  REGION 1..263: note = Round 1 (Selectivity)
MVSAHFILIHTICHGAWLWYKLIPLLQSAGHNATAIDLVASGIDPRQWEQIGTWEQYSEPLFTLIESIPEGKKVILVGESGGGINIALAAEKYPEKVSALVFHNALMPDIDHSPAFVYKKFSEVFTDWKDSIFSNYTYGNDTVTAVELGDRTLAENIFSNSPIEDVELAKHLVRKGSFFEQDLDTLPNFTSEGYGSIRRVYVYGEEDQIFSRDFQLWQINNYKPDKVYCVPSADHKIQISKVNELAQILQEVANSASDLLAVA

SEQ ID NO: 375 - DNA, 789 bp, synthetic construct
  misc_feature 1..789: note = Round 1 (Selectivity)
  source 1..789: mol_type = other DNA
atggttagtgcgcattttattctgatccacaccatttgccatggcgcctggctctggtataaactgatcccgttattacagtctgcaggtcataacgctacggcgattgatcttgtggctagcgggatcgaccctcgccaactggaacagattggcacatgggagcagtactcagaaccattgttcaccctgatcgaatcgattccggaaggtaagaaagtcattctggtaggagaatccggtggcggcatcaatattgcactggccgcggagaaatatccggagaaagtgagcgccctcgtctttcacaacgcacttatgcccgatatcgatcacagtccagcgttcgtgtacaagaaatttagcgaagttttcactgactggaaagattcgatcttcagcaattatacctacggtaacgacacggttaccgcggtggaattgggagatcgtactctggccgagaacatcttctccaattctccgattgaagatgtagaactggcgaaacatctggtccgcaaaggctccttctttgagcaagacttggataccctgccgaactttacgtcggaagggtatggttcaattcgtcgtgtgtatgtttacggcgaagaagacgctatctttagccgcgattttcagttatggcaaattaataattataagcctgataaagtgtactgtgtaccgagtgctgaccacaagattcagatcagcaaagtcaacgagctggcccagattctccaagaagttgcaaactctgcgagtgatcttcttgcagtggct

SEQ ID NO: 376 - protein, 263 aa, synthetic construct
  REGION 1..263: note = Round 1 (Selectivity)
MVSAHFILIHTICHGAWLWYKLIPLLQSAGHNATAIDLVASGIDPRQLEQIGTWEQYSEPLFTLIESIPEGKKVILVGESGGGINIALAAEKYPEKVSALVFHNALMPDIDHSPAFVYKKFSEVFTDWKDSIFSNYTYGNDTVTAVELGDRTLAENIFSNSPIEDVELAKHLVRKGSFFEQDLDTLPNFTSEGYGSIRRVYVYGEEDAIFSRDFQLWQINNYKPDKVYCVPSADHKIQISKVNELAQILQEVANSASDLLAVA

SEQ ID NO: 377 - DNA, 789 bp, synthetic construct
  misc_feature 1..789: note = Round 1 (Selectivity)
  source 1..789: mol_type = other DNA
atggttagtgcgcattttattctgatccacaccatttgccatggcgcctggctctggtataaactgatcccgttattacagtctgcaggtcataacgctacggcgattgatcttgtggctagcgggatcgaccctcgccaactggaacagattggcacatgggagcagtactcagaaccattgttcaccctgatcgaatcgattccggaaggtaagaaagtcattctggtaggagaatccggtggcggcatcaatattgcactggccgcggagaaatatccggagaaagtgagcgccctcgtctttcacaacgcacttatgcccgatatcgatcacagtccagcgttcgtgtacaagaaatttagcgaagttttcactgactggaaagattcgatcttcagcaattatacctacggtaacgacacggttaccgcggtggaattgggagatcgtactctggccgagaacatcatgtccaattctccgattgaagatgtagaactggcgaaacatctggtccgcaaaggctccttctttgagcaagacttggataccctgccgaactttacgtcggaagggtatggttcaattcgtcgtgtgtatgtttacggcgaagaagaccagatctttagccgcgattttcagttatggcaaattaataattataagcctgataaagtgtactgtgtaccgagtgctgaccacaagattcagatcagcaaagtcaacgagctggcccagattctccaagaagttgcaaactctgcgagtgatcttcttgcagtggct

SEQ ID NO: 378 - protein, 263 aa, synthetic construct
  REGION 1..263: note = Round 1 (Selectivity)
MVSAHFILIHTICHGAWLWYKLIPLLQSAGHNATAIDLVASGIDPRQLEQIGTWEQYSEPLFTLIESIPEGKKVILVGESGGGINIALAAEKYPEKVSALVFHNALMPDIDHSPAFVYKKFSEVFTDWKDSIFSNYTYGNDTVTAVELGDRTLAENIMSNSPIEDVELAKHLVRKGSFFEQDLDTLPNFTSEGYGSIRRVYVYGEEDQIFSRDFQLWQINNYKPDKVYCVPSADHKIQISKVNELAQILQEVANSASDLLAVA

SEQ ID NO: 379 - DNA, 789 bp, synthetic construct
  misc_feature 1..789: note = Round 1 (Selectivity)
  source 1..789: mol_type = other DNA
atggttagtgcgcattttattctgatccacaccatttgccatggcgcctggctctggtataaactgatcccgttattacagtctgcaggtcataacgctacggcgattgatcttgtggctagcgggatcgaccctcgccaactggaacagattggcacatgggagcagtactcagaaccattgttcaccctgatcgaatcgattccggaaggtaagaaagtcattctggtaggagaatccggtggcggcatcaatattgcactggccgcggagaaatatccggagaaagtgagcgccctcgtctttcacaacgcacttatgcccgatatcgatcacagtccagcgttcgtgtacaagaaatttagcgaagttttcactgactggaaagattcgatcttcagcaattatacctacggtaacgacacggttaccgcggtggaattgggaattcgtactctggccgagaacatcttctccaattctccgattgaagatgtagaactggcgaaacatctggtccgcaaaggctccttctttgagcaagacttggataccctgccgaactttacgtcggaagggtatggttcaattcgtcgtgtgtatgtttacggcgaagaagaccagatctttagccgcgattttcagttatggcaaattaataattataagcctgataaagtgtactgtgtaccgagtgctgaccacaagattcagatcagcaaagtcaacgagctggcccagattctccaagaagttgcaaactctgcgagtgatcttcttgcagtggct

SEQ ID NO: 380 - protein, 263 aa, synthetic construct
  REGION 1..263: note = Round 1 (Selectivity)
MVSAHFILIHTICHGAWLWYKLIPLLQSAGHNATAIDLVASGIDPRQLEQIGTWEQYSEPLFTLIESIPEGKKVILVGESGGGINIALAAEKYPEKVSALVFHNALMPDIDHSPAFVYKKFSEVFTDWKDSIFSNYTYGNDTVTAVELGIRTLAENIFSNSPIEDVELAKHLVRKGSFFEQDLDTLPNFTSEGYGSIRRVYVYGEEDQIFSRDFQLWQINNYKPDKVYCVPSADHKIQISKVNELAQILQEVANSASDLLAVA

SEQ ID NO: 381 - DNA, 789 bp, synthetic construct
  misc_feature 1..789: note = Round 1 (Selectivity)
  source 1..789: mol_type = other DNA
atggttagtgcgcattttattctgatccacaccatttgccatggcgcctggctctggtataaactgatcccgttattacagtctgcaggtcataacgctacggcgattgatcttgtggctagcgggatcgaccctcgccaactggaacagattggcacatgggagcagtactcagaaccattgttcaccctgatcgaatcgattccggaaggtaagaaagtcattctggtaggagaatccggtggcggcatcaatattgcactggccgcggagaaatatccggagaaagtgagcgccctcgtctttcacaacgcacttatgcccgatatcgatcacagtccagcgttcgtgtacaagaaatttagcgaagttttcactgactggaaagattcgatcttcagcaattatacctacggtaacgacacggttaccgcggtggaattgggagatcgtactctggccgagaacatcttctccaattctccgattgaagatgtagaactggcgaaacatctggtccgcaaaggctccttctttgagcaagacttggataccctgccgaactttacgtcggaagggtatggttcaattcgtcgtgtgtatgtttacggcgaagaagacctgatctttagccgcgattttcagttatggcaaattaataattataagcctgataaagtgtactgtgtaccgagtgctgaccacaagattcagatcagcaaagtcaacgagctggcccagattctccaagaagttgcaaactctgcgagtgatcttcttgcagtggct

SEQ ID NO: 382 - protein, 263 aa, synthetic construct
  REGION 1..263: note = Round 1 (Selectivity)
MVSAHFILIHTICHGAWLWYKLIPLLQSAGHNATAIDLVASGIDPRQLEQIGTWEQYSEPLFTLIESIPEGKKVILVGESGGGINIALAAEKYPEKVSALVFHNALMPDIDHSPAFVYKKFSEVFTDWKDSIFSNYTYGNDTVTAVELGDRTLAENIFSNSPIEDVELAKHLVRKGSFFEQDLDTLPNFTSEGYGSIRRVYVYGEEDLIFSRDFQLWQINNYKPDKVYCVPSADHKIQISKVNELAQILQEVANSASDLLAVA

SEQ ID NO: 383 - DNA, 789 bp, synthetic construct
  misc_feature 1..789: note = Round 1 (Selectivity)
  source 1..789: mol_type = other DNA
atggttagtgcgcattttattctgatccacaccatttgccatggcgcctggctctggtataaactgatcccgttattacagtctgcaggtcataacgctacggcgattgatcttgtggctagcgggatcgaccctcgccaactggaacagattggcacatgggagcagtactcagaaccattgttcaccctgatcgaatcgattccggaaggtaagaaagtcattctggtaggagaatccggtggcggcatcaatattgcactggccgcggagaaatatccggagaaagtgagcgccctcgtctttcacaacgcacttatgcccgatatcgatcacagtccagcgttcgtgtacaagaaatttagcgaagttttcactgactggaaagattcgatcttcagcaattatacctacggtaacgacacggttaccgcggtggaattgggagatcgtactctggccgagaacatcttctccaattctccgattgaagatgtagaactggcgaaacatctggtccgcaaaggctccttctttgagcaagacttggataccctgccgaactttacgtcggaagggtatggttcaattcgtcgtgtgtatgtttacggcgaagaagaccagtgttttagccgcgattttcagttatggcaaattaataattataagcctgataaagtgtactgtgtaccgagtgctgaccacaagattcagatcagcaaagtcaacgagctggcccagattctccaagaagttgcaaactctgcgagtgatcttcttgcagtggct

SEQ ID NO: 384 - protein, 263 aa, synthetic construct
  REGION 1..263: note = Round 1 (Selectivity)
MVSAHFILIHTICHGAWLWYKLIPLLQSAGHNATAIDLVASGIDPRQLEQIGTWEQYSEPLFTLIESIPEGKKVILVGESGGGINIALAAEKYPEKVSALVFHNALMPDIDHSPAFVYKKFSEVFTDWKDSIFSNYTYGNDTVTAVELGDRTLAENIFSNSPIEDVELAKHLVRKGSFFEQDLDTLPNFTSEGYGSIRRVYVYGEEDQCFSRDFQLWQINNYKPDKVYCVPSADHKIQISKVNELAQILQEVANSASDLLAVA

SEQ ID NO: 385 - DNA, 789 bp, synthetic construct
  misc_feature 1..789: note = Round 1 (Selectivity)
  source 1..789: mol_type = other DNA
atggttagtgcgcattttattctgatccacaccatttgccatggcgcctggctctggtataaactgatcccgttattacagtctgcaggccataacgctacggcgattgatcttgtggctagcgggatcgaccctcgccaactggaacagattggcacatgggagcagtactcagaaccattgttcaccctgatcgaatcgattccggaaggtaagaaagtcattctggtaggagaatccggtggcggcatcaatattgcactggccgcggagaaatatccggagaaagtgagcgccctcgtctttcacaacgcacttatgcccgatatcgatcacagtccagcgttcgtgtacaagaaatttagcgaagttttcactgactggaaagattcgatcttcagcaattatacctacggtaacgacacggttaccgcggtggaattgggagatcgtactctggccgagaacatcttctccaattctccgattgaagatgtagaactgtcgaaacatctggtccgcaaaggctccttctttgagcaagacttggataccctgccgaactttacgtcggaagggtatggttcaattcgtcgtgtgtatgtttacggcgaagaagaccagatctttagccgcgattttcagttatggcaaattaataattataagcctgataaagtgtactgtgtaccgagtgctgaccacaagattcagatcagcaaagtcaacgagctggcccagattctccaagaagttgcaaactctgcgagtgatcttcttgcagtggct

SEQ ID NO: 386 - protein, 263 aa, synthetic construct
  REGION 1..263: note = Round 1 (Selectivity)
MVSAHFILIHTICHGAWLWYKLIPLLQSAGHNATAIDLVASGIDPRQLEQIGTWEQYSEPLFTLIESIPEGKKVILVGESGGGINIALAAEKYPEKVSALVFHNALMPDIDHSPAFVYKKFSEVFTDWKDSIFSNYTYGNDTVTAVELGDRTLAENIFSNSPIEDVELSKHLVRKGSFFEQDLDTLPNFTSEGYGSIRRVYVYGEEDQIFSRDFQLWQINNYKPDKVYCVPSADHKIQISKVNELAQILQEVANSASDLLAVA

SEQ ID NO: 387 - DNA, 789 bp, synthetic construct
  misc_feature 1..789: note = Round 1 (Selectivity)
  source 1..789: mol_type = other DNA
atggttagtgcgcattttattctgatccacaccatttgccatggcgcctggctctggtataaactgatcccgttattacagtctgcaggtcataacgctacggcgattgatcttgtggctagcgggatcgaccctcgccaactggaacagattggcacatgggagcagtactcagaaccattgttcaccctgatcgaatcgattccggaaggtaagaaagtcattctggtaggagaatccggtggcggcatcaatattgcactggccgcggagaaatatccggagaaagtgagcgccctcgtctttcacaacgcacttatgcccgatatcgatcacagtccagcgttcgtgtacaagaaatttagcgaagttttcactgactggaaagattcgatcttcagcaattatacctacggtaacgacacggttaccgcggtggaattgggacttcgtactctggccgagaacatcttctccaattctccgattgaagatgtagaactggcgaaacatctggtccgcaaaggctccttctttgagcaagacttggataccctgccgaactttacgtcggaagggtatggttcaattcgtcgtgtgtatgtttacggcgaagaagaccagatctttagccgcgattttcagttatggcaaattaataattataagcctgataaagtgtactgtgtaccgagtgctgaccacaagattcagatcagcaaagtcaacgagctggcccagattctccaagaagttgcaaactctgcgagtgatcttcttgcagtggct

SEQ ID NO: 388 - protein, 263 aa, synthetic construct
  REGION 1..263: note = Round 1 (Selectivity)
MVSAHFILIHTICHGAWLWYKLIPLLQSAGHNATAIDLVASGIDPRQLEQIGTWEQYSEPLFTLIESIPEGKKVILVGESGGGINIALAAEKYPEKVSALVFHNALMPDIDHSPAFVYKKFSEVFTDWKDSIFSNYTYGNDTVTAVELGLRTLAENIFSNSPIEDVELAKHLVRKGSFFEQDLDTLPNFTSEGYGSIRRVYVYGEEDQIFSRDFQLWQINNYKPDKVYCVPSADHKIQISKVNELAQILQEVANSASDLLAVA

SEQ ID NO: 389 - DNA, 789 bp, synthetic construct
  misc_feature 1..789: note = Round 1 (Selectivity)
  source 1..789: mol_type = other DNA
atggttagtgcgcattttattctgatccacaccatttgccatggcgcctggctctggtataaactgatcccgttattacagtctgcaggtcataacgctacggcgattgatcttgtggctagcgggatcgaccctcgccaactggaacagattggcacatgggagcagtactcagaaccattgttcaccctgatcgaatcgattccggaaggtaagaaagtcattctggtaggagaatccggtggcggcatcaatattgcactggccgcggagaaatatccggagaaagtgagcgccctcgtctttcacaacgcacttatgcccgatatcgatcacagtccagcgttcgtgtacaagtattttagcgaagttttcactgactggaaagattcgatcttcagcaattatacctacggtaacgacacggttaccgcggtggaattgggagatcgtactctggccgagaacatcttctccaattctccgattgaagatgtagaactggcgaaacatctggtccgcaaaggctccttctttgagcaagacttggataccctgccgaactttacgtcggaagggtatggttcaattcgtcgtgtgtatgtttacggcgaagaagaccagatctttagccgcgattttcagttatggcaaattaataattataagcctgataaagtgtactgtgtaccgagtgctgaccacaagattcagatcagcaaagtcaacgagctggcccagattctccaagaagttgcaaactctgcgagtgatcttcttgcagtggct

SEQ ID NO: 390 - protein, 263 aa, synthetic construct
  REGION 1..263: note = Round 1 (Selectivity)
MVSAHFILIHTICHGAWLWYKLIPLLQSAGHNATAIDLVASGIDPRQLEQIGTWEQYSEPLFTLIESIPEGKKVILVGESGGGINIALAAEKYPEKVSALVFHNALMPDIDHSPAFVYKYFSEVFTDWKDSIFSNYTYGNDTVTAVELGDRTLAENIFSNSPIEDVELAKHLVRKGSFFEQDLDTLPNFTSEGYGSIRRVYVYGEEDQIFSRDFQLWQINNYKPDKVYCVPSADHKIQISKVNELAQILQEVANSASDLLAVA

SEQ ID NO: 391 - DNA, 789 bp, synthetic construct
  misc_feature 1..789: note = Round 1 (Selectivity)
  source 1..789: mol_type = other DNA
atggttagtgcgcattttattctggttcacacgatttgccatggcgcctggctctggtataaactgatcccgttattacagtctgcaggtcataacgccacggcgattgatcttgtggctagcgggatcgaccctcgccaactggaacagattggcacatgggagcagtactcagaaccattgttcaccctgatcgaatcgatcccggaaggtgagaaagtcattctggtaggagaatccggtggcggcatcaatattgcactggccgcggagaaatatccggagaaaattagcgccctcgtctttcacaacgcacttatgcccgatatcgatcacagtccagcgttcgtgtacaagaaatttagcgaagttttcactgactggaaagattcgatcttcagcaattatacctacggtaacgacacggttaccgcggtggaattgggagatcgtactctggccgagaacatctactccaattctccgattgaagatgtagaactggcgaaacatctggtccgcaaaggctccttctttgagcaagacttggataccctgccgaactttacgtcggaagggtatggttcaattcgtcgtgtgtatgtctacggcgaagaagaccagatctttagccgcgattttcagttatggcagattaataattataagcctgataaagtgtactgtgtaccgagtgctgaccacaagcctcagtttagcaaagtcaacgagctggcccagattctccaagaagttgcaaactctgcgagtgatcttcttgcagtggct

SEQ ID NO: 392 - protein, 263 aa, synthetic construct
  REGION 1..263: note = Round 1 (Selectivity)
MVSAHFILVHTICHGAWLWYKLIPLLQSAGHNATAIDLVASGIDPRQLEQIGTWEQYSEPLFTLIESIPEGEKVILVGESGGGINIALAAEKYPEKISALVFHNALMPDIDHSPAFVYKKFSEVFTDWKDSIFSNYTYGNDTVTAVELGDRTLAENIYSNSPIEDVELAKHLVRKGSFFEQDLDTLPNFTSEGYGSIRRVYVYGEEDQIFSRDFQLWQINNYKPDKVYCVPSADHKPQFSKVNELAQILQEVANSASDLLAVA

SEQ ID NO: 393 - DNA, 789 bp, synthetic construct
  misc_feature 1..789: note = Round 1 (Selectivity)
  source 1..789: mol_type = other DNA
atggttagtgcgcattttattctgatccacaccatttgccatggcgcctggctctggtataaactgatcccgttattacagtctgcaggtcataacgctacggcgattgatcttgtggctagcgggatcgaccctcgccaactggaacagattggcacatgggagcagtactcagaaccattgttcaccctgatcgaatcgattccggaaggtaagaaagtcattctggtaggagaatccggtggcggcatcaatattgcactggccgcggagaaatatccggagaaagtgagcgccctcgtctttcacaacgcacttatgcccgatatcgatcacagtccagcgttcgtgtacaagaaatttagcgaagttttcactgactggaaagattcgatcttcctgaattatacctacggtaacgacacggttaccgcggtggaattgggagatcgtactctggccgagaacatcttctccaattctccgattgaagatgtagaactggcgaaacatctggtccgcaaaggctccttctttgagcaagacttggataccctgccgaactttacgtcggaagggtatggttcaattcgtcgtgtgtatgtttacggcgaagaagaccagatctttagccgcgattttcagttatggcaaattaataattataagcctgataaagtgtactgtgtaccgagtgctgaccacaagattcagatcagcaaagtcaacgagctggcccagattctccaagaagttgcaaactctgcgagtgatcttcttgcagtggct

SEQ ID NO: 394 - protein, 263 aa, synthetic construct
  REGION 1..263: note = Round 1 (Selectivity)
MVSAHFILIHTICHGAWLWYKLIPLLQSAGHNATAIDLVASGIDPRQLEQIGTWEQYSEPLFTLIESIPEGKKVILVGESGGGINIALAAEKYPEKVSALVFHNALMPDIDHSPAFVYKKFSEVFTDWKDSIFLNYTYGNDTVTAVELGDRTLAENIFSNSPIEDVELAKHLVRKGSFFEQDLDTLPNFTSEGYGSIRRVYVYGEEDQIFSRDFQLWQINNYKPDKVYCVPSADHKIQISKVNELAQILQEVANSASDLLAVA

SEQ ID NO: 395 - DNA, 789 bp, synthetic construct
  misc_feature 1..789: note = Round 1 (Selectivity)
  source 1..789: mol_type = other DNA
atggttagtgcgcattttattctgatccacaccatttgccatggcgcctggctctggtataaactgatcccgttattacagtctgcaggtcataacgctacggcgattgatcttgtggctagcgggatcgaccctcgccaactggaacagattggcacatgggagcagtactcagaaccattgttcaccctgatcgaatcgattccggaaggtaagaaagtcattctggtaggagaatccggtggcggcatcaatattgcactggccgcggagaaatatccggagaaagtgagcgccctcgtctttcacaacgcacttatgcccgatatcgatcacagtccagcgttcgtgtacaagaaatttagcgaacctttcactgactggaaagattcgatcttcagcaattatacctacggtaacgacacggttaccgcggtggaattgggagatcgtactctggccgagaacatcttctccaattctccgattgaagatgtagaactggcgaaacatctggtccgcaaaggctccttctttgagcaagacttggataccctgccgaactttacgtcggaagggtatggttcaattcgtcgtgtgtatgtttacggcgaagaagaccagatctttagccgcgattttcagttatggcaaattaataattataagcctgataaagtgtactgtgtaccgagtgctgaccacaagattcagatcagcaaagtcaacgagctggcccagattctccaagaagttgcaaactctgcgagtgatcttcttgcagtggct

SEQ ID NO: 396 - protein, 263 aa, synthetic construct
  REGION 1..263: note = Round 1 (Selectivity)
MVSAHFILIHTICHGAWLWYKLIPLLQSAGHNATAIDLVASGIDPRQLEQIGTWEQYSEPLFTLIESIPEGKKVILVGESGGGINIALAAEKYPEKVSALVFHNALMPDIDHSPAFVYKKFSEPFTDWKDSIFSNYTYGNDTVTAVELGDRTLAENIFSNSPIEDVELAKHLVRKGSFFEQDLDTLPNFTSEGYGSIRRVYVYGEEDQIFSRDFQLWQINNYKPDKVYCVPSADHKIQISKVNELAQILQEVANSASDLLAVA

SEQ ID NO: 397 - DNA, 789 bp, synthetic construct
  misc_feature 1..789: note = Round 1 (Selectivity)
  source 1..789: mol_type = other DNA
atggttagtgcgcattttattctgatccacaccatttgccatggcgcctggctctggtataaactgatcccgttattacagtctgcaggtcataacgctacggcgattgatcttgtggctagcgggatcgaccctcgccaactggaacagattggcacatgggagcagtactcagaaccattgttcaccctgatcgaatcgattccggaaggtaagaaagtcattctggtaggagaatccggtggcggcatcaatattgcactggccgcggagaaatatccggagaaagtgagcgccctcgtctttcacaacgcacttatgcccgatatcgatcacagtccagcgttcgtgtacaagaaatttagcgaagttttcactgactggaaagattcgatcttcagcaattatacctacggtaacgacacggttaccgcggtggaattgggagatcgtactctggccgagaacatcttctccaattctccgattgaagatgtagaactggcgaaacatctggtccgcgatggctccttctttgagcaagacttggataccctgccgaactttacgtcggaagggtatggttcaattcgtcgtgtgtatgtttacggcgaagaagaccagatctttagccgcgattttcagttatggcaaattaataattataagcctgataaagtgtactgtgtaccgagtgctgaccacaagattcagatcagcaaagtcaacgagctggcccagattctccaagaagttgcaaactctgcgagtgatcttcttgcagtggct

SEQ ID NO: 398 - protein, 263 aa, synthetic construct
  REGION 1..263: note = Round 1 (Selectivity)
MVSAHFILIHTICHGAWLWYKLIPLLQSAGHNATAIDLVASGIDPRQLEQIGTWEQYSEPLFTLIESIPEGKKVILVGESGGGINIALAAEKYPEKVSALVFHNALMPDIDHSPAFVYKKFSEVFTDWKDSIFSNYTYGNDTVTAVELGDRTLAENIFSNSPIEDVELAKHLVRDGSFFEQDLDTLPNFTSEGYGSIRRVYVYGEEDQIFSRDFQLWQINNYKPDKVYCVPSADHKIQISKVNELAQILQEVANSASDLLAVA

SEQ ID NO: 399 - DNA, 789 bp, synthetic construct
  misc_feature 1..789: note = Round 1 (Selectivity)
  source 1..789: mol_type = other DNA
atggttagtgcgcattttattctgatccacaccatttgccatggcgcctggctctggtataaactgatcccgttattacagtctgcaggtcataacgctacggcgattgatcttgtggctagcgggatcgaccctcgccaactggaacagattggcacatgggagcagtactcagaaccattgttcaccctgatcgaatcgattccggaaggtaagaaagtcattctggtaggagaatccggtggcggcatcaatattgcactggccgcggagaaatatccggagaaagtgagcgccctcgtctttcacaacgcacttatgcccgatatcgatcacagtccagcgttcgtgtacaagaaatttagcgaagttttcactgactggaaagattcgatctggagcaattatacctacggtaacgacacggttaccgcggtggaattgggagatcgtactctggccgagaacatcttctccaattctccgattgaagatgtagaactggcgaaacatctggtccgcaaaggctccttctttgagcaagacttggataccctgccgaactttacgtcggaagggtatggttcaattcgtcgtgtgtatgtttacggcgaagaagaccagatctttagccgcgattttcagttatggcaaattaataattataagcctgataaagtgtactgtgtaccgagtgctgaccacaagattcagatcagcaaagtcaacgagctggcccagattctccaagaagttgcaaactctgcgagtgatcttcttgcagtggct

SEQ ID NO: 400 - protein, 263 aa, synthetic construct
  REGION 1..263: note = Round 1 (Selectivity)
MVSAHFILIHTICHGAWLWYKLIPLLQSAGHNATAIDLVASGIDPRQLEQIGTWEQYSEPLFTLIESIPEGKKVILVGESGGGINIALAAEKYPEKVSALVFHNALMPDIDHSPAFVYKKFSEVFTDWKDSIWSNYTYGNDTVTAVELGDRTLAENIFSNSPIEDVELAKHLVRKGSFFEQDLDTLPNFTSEGYGSIRRVYVYGEEDQIFSRDFQLWQINNYKPDKVYCVPSADHKIQISKVNELAQILQEVANSASDLLAVA

SEQ ID NO: 401 - DNA, 789 bp, synthetic construct
  misc_feature 1..789: note = Round 1 (Selectivity)
  source 1..789: mol_type = other DNA
atggttagtgcgcattttattctgatccacaccatttgccatggcgcctggctctggtataaactgatcccgttattacagtctgcaggtcataacgctacggcgattgatcttgtggctagcgggatcgaccctcgccaactggaacagattggcacatgggagcagtactcagaaccattgttcaccctgatcgaatcgattccggaaggtaagaaagtcattctggtaggagaatccggtggcggcatcaatattgcactggccgcggagaaatatccggagaaagtgagcgccctcgtctttcacaacgcacttatgcccgatatcgatcacagtccagcgttcgtgtacaagaaatttagcgaagttttcactgactggaaagattcgatcttcagcaattatacctacggtaacgacacggttaccgcgggggaattgggagatcgtactctggccgagaacatcttctccaattctccgattgaagatgtagaactggcgaaacatctggtccgcaaaggctccttctttgagcaagacttggataccctgccgaactttacgtcggaagggtatggttcaattcgtcgtgtgtatgtttacggcgaagaagaccagatctttagccgcgattttcagttatggcaaattaataattataagcctgataaagtgtactgtgtaccgagtgctgaccacaagattcagatcagcaaagtcaacgagctggcccagattctccaagaagttgcaaactctgcgagtgatcttcttgcagtggct

SEQ ID NO: 402 - protein, 263 aa, synthetic construct
  REGION 1..263: note = Round 1 (Selectivity)
MVSAHFILIHTICHGAWLWYKLIPLLQSAGHNATAIDLVASGIDPRQLEQIGTWEQYSEPLFTLIESIPEGKKVILVGESGGGINIALAAEKYPEKVSALVFHNALMPDIDHSPAFVYKKFSEVFTDWKDSIFSNYTYGNDTVTAGELGDRTLAENIFSNSPIEDVELAKHLVRKGSFFEQDLDTLPNFTSEGYGSIRRVYVYGEEDQIFSRDFQLWQINNYKPDKVYCVPSADHKIQISKVNELAQILQEVANSASDLLAVA

SEQ ID NO: 403 - DNA, 789 bp, synthetic construct
  misc_feature 1..789: note = Round 1 (Selectivity)
  source 1..789: mol_type = other DNA
atggttagtgcgcattttattctgatccacaccatttgccatggcgcctggctctggtataaactgatcccgttattacagtctgcaggtcataacgctacggcgattgatcttgtggctagcgggatcgaccctcgccaactggaacagattggcacatgggagcagtactcagaaccattgttcaccctgatcgaatcgattccggaaggtaagaaagtcattctggtaggagaatccggtggcggcatcaatattgcactggccgcggagaaatatccggagaaagtgagcgccctcgtctttcacaacgcacttatgcccgatatcgatcacagtccagcgttcgtgtacaagaaatttagcgaagttttcactgactggaaagattcgatcttcagcaattatacctacggtaacgacacggttttggcggtggaattgggagatcgtactctggccgagaacatcttctccaattctccgattgaagatgtagaactggcgaaacatctggtccgcaaaggctccttctttgagcaagacttggataccctgccgaactttacgtcggaagggtatggttcaattcgtcgtgtgtatgtttacggcgaagaagaccagatctttagccgcgattttcagttatggcaaattaataattataagcctgataaagtgtactgtgtaccgagtgctgaccacaagattcagatcagcaaagtcaacgagctggcccagattctccaagaagttgcaaactctgcgagtgatcttcttgcagtggct

SEQ ID NO: 404 - protein, 263 aa, synthetic construct
  REGION 1..263: note = Round 1 (Selectivity)
MVSAHFILIHTICHGAWLWYKLIPLLQSAGHNATAIDLVASGIDPRQLEQIGTWEQYSEPLFTLIESIPEGKKVILVGESGGGINIALAAEKYPEKVSALVFHNALMPDIDHSPAFVYKKFSEVFTDWKDSIFSNYTYGNDTVLAVELGDRTLAENIFSNSPIEDVELAKHLVRKGSFFEQDLDTLPNFTSEGYGSIRRVYVYGEEDQIFSRDFQLWQINNYKPDKVYCVPSADHKIQISKVNELAQILQEVANSASDLLAVA

SEQ ID NO: 405 - DNA, 789 bp, synthetic construct
  misc_feature 1..789: note = Round 1 (Selectivity)
  source 1..789: mol_type = other DNA
atggttagtgcgcattttattctgatccacaccatttgccatggcgcctggctctggtataaactgatcccgttattacagtctgcaggtcataacgctacggcgattgatcttgtggcttgtgggatcgaccctcgccaactggaacagattggcacatgggagcagtactcagaaccattgttcaccctgatcgaatcgattccggaaggtaagaaagtcattctggtaggagaatccggtggcggcatcaatattgcactggccgcggagaaatatccggagaaagtgagcgccctcgtctttcacaacgcacttatgcccgatatcgatcacagtccagcgttcgtgtacaagaaatttagcgaagttttcactgactggaaagattcgatcttcagcaattatacctacggtaacgacacggttaccgcggtggaattgggagatcgtactctggccgagaacatcttctccaattctccgattgaagatgtagaactggcgaaacatctggtccgcaaaggctccttctttgagcaagacttggataccctgccgaactttacgtcggaagggtatggttcaattcgtcgtgtgtatgtttacggcgaagaagaccagatctttagccgcgattttcagttatggcaaattaataattataagcctgataaagtgtactgtgtaccgagtgctgaccacaagattcagatcagcaaagtcaacgagctggcccagattctccaagaagttgcaaactctgcgagtgatcttcttgcagtggct

SEQ ID NO: 406 - protein, 263 aa, synthetic construct
  REGION 1..263: note = Round 1 (Selectivity)
MVSAHFILIHTICHGAWLWYKLIPLLQSAGHNATAIDLVACGIDPRQLEQIGTWEQYSEPLFTLIESIPEGKKVILVGESGGGINIALAAEKYPEKVSALVFHNALMPDIDHSPAFVYKKFSEVFTDWKDSIFSNYTYGNDTVTAVELGDRTLAENIFSNSPIEDVELAKHLVRKGSFFEQDLDTLPNFTSEGYGSIRRVYVYGEEDQIFSRDFQLWQINNYKPDKVYCVPSADHKIQISKVNELAQILQEVANSASDLLAVA

SEQ ID NO: 407 - DNA, 789 bp, synthetic construct
  misc_feature 1..789: note = Round 1 (Selectivity)
  source 1..789: mol_type = other DNA
atggttagtgcgcattttattctgatccacaccatttgccatggcgcctggctctggtataaactgatcccgttattacagtctgcaggtcataacgctacggcgattgatcttgtggctagcgggatcgaccctcgccaactggaacagattggcacatgggagcagtactcagaaccattgttcaccctgatcgaatcgattccggaaggtaagaaagtcattctggtaggagaatccggtggcggcatcaatattgcactggccgcggagaaatatccggagaaagtgagcgccctcgtctttcacaacgcacttatgcccgatatcgatcacagtccagcgttcgtgtacaagaaatttagcgaagttttcactgactggaaagattcgatcttcagcaattatacctacggtaacgacacggttacctttgtggaattgggagatcgtactctggccgagaacatcttctccaattctccgattgaagatgtagaactggcgaaacatctggtccgcaaaggctccttctttgagcaagacttggataccctgccgaactttacgtcggaagggtatggttcaattcgtcgtgtgtatgtttacggcgaagaagaccagatctttagccgcgattttcagttatggcaaattaataattataagcctgataaagtgtactgtgtaccgagtgctgaccacaagattcagatcagcaaagtcaacgagctggcccagattctccaagaagttgcaaactctgcgagtgatcttcttgcagtggct

SEQ ID NO: 408 - protein, 263 aa, synthetic construct
  REGION 1..263: note = Round 1 (Selectivity)
MVSAHFILIHTICHGAWLWYKLIPLLQSAGHNATAIDLVASGIDPRQLEQIGTWEQYSEPLFTLIESIPEGKKVILVGESGGGINIALAAEKYPEKVSALVFHNALMPDIDHSPAFVYKKFSEVFTDWKDSIFSNYTYGNDTVTFVELGDRTLAENIFSNSPIEDVELAKHLVRKGSFFEQDLDTLPNFTSEGYGSIRRVYVYGEEDQIFSRDFQLWQINNYKPDKVYCVPSADHKIQISKVNELAQILQEVANSASDLLAVA

SEQ ID NO: 409 - DNA, 789 bp, synthetic construct
  misc_feature 1..789: note = Round 1 (Selectivity)
  source 1..789: mol_type = other DNA
atggttagtgcgcattttattctgatccacaccatttgccatggcgcctggctgtggtataaactgatcccgttattacagtctgcaggtcataacgctacggcgattgatcttgtggctagcgggatcgaccctcgccaactggaacagattggcacatgggagcagtactcagaaccattgttcaccctgatcgaatcgatcccggaaggtaagaaagtcattctggtaggagaatccggtggcggcatcaatattgcactggccgcggagaaatatccggagaaagtgagcgccctcgtctttcacaacgcacttatgcccgatatcgatcacagtccagcgttcgtgtacaagaaatttagcgaagttttcactgactggaaagattcgatcttcagcaattatacctacggtaacgacacggttaccgcggtggaattgggagatcgtactctggccgagaacatctactccaattctccgattgaagatgtagaactggcgaaacatctggtccgcaaaggctccttctttgagcaagacttggataccctgccgaactttacgtcggaagggtatggttcaattcgtcgtgtgtatgtttacggcgaagaagaccagatctttagccgcgattttcagttatggcaaattaataattataagcctgataaagtgtactgtgtaccgagtgctgaccacaagattcagatcagcaaagtcaacgagctggcccagattctccaagaagttgcaaactctgcgagtgatcttcttgcagtggct

SEQ ID NO: 410 - protein, 263 aa, synthetic construct
  REGION 1..263: note = Round 1 (Selectivity)
MVSAHFILIHTICHGAWLWYKLIPLLQSAGHNATAIDLVASGIDPRQLEQIGTWEQYSEPLFTLIESIPEGKKVILVGESGGGINIALAAEKYPEKVSALVFHNALMPDIDHSPAFVYKKFSEVFTDWKDSIFSNYTYGNDTVTAVELGDRTLAENIYSNSPIEDVELAKHLVRKGSFFEQDLDTLPNFTSEGYGSIRRVYVYGEEDQIFSRDFQLWQINNYKPDKVYCVPSADHKIQISKVNELAQILQEVANSASDLLAVA

SEQ ID NO: 411 - DNA, 789 bp, synthetic construct
  misc_feature 1..789: note = Round 1 (Selectivity)
  source 1..789: mol_type = other DNA
atggttagtgcgcattttattctggttcacacgatttgccatggcgcctggctctggtataaactgatcccgttattacagtctgcaggtcataacgctacggcgattgatcttgtggctagcgggatcgaccctcgccaactggaacagattggcacatgggagcagtactcagaaccattgttcaccctgatcgaatcgattccggaaggtaagaaagtcattctggtaggagaatccggtggcggcatcaatattgcactggccgcggagaaatatccggagaaagtgagcgccctcgtctttcacaacgcacttatgcccgatatcgatcacagtccagcgttcgtgtacaagaaatttagcgaagttttcactgactggaaagattcgatcttcagcaattatacctacggtaacgacacggttaccgcggtggaattgggagatcgtactctggccgagaacatcttctccaattctccgattgaagatgtagaactggcgaaacatctggtccgcaaaggctccttctttgagcaagacttggataccctgccgaactttacgtcggaagggtatggttcaattcgtcgtgtgtatgtttacggcgaagaagaccagatctttagccgcgattttcagttatggatgattaataattataagcctgataaagtgtactgtgtaccgagtgctgaccacaagatccagtttagcaaagtcaacgagctggcccagattctccaagaagttgcaaactctgcgagtgatcttcttgcagtggct

SEQ ID NO: 412 - protein, 263 aa, synthetic construct
  REGION 1..263: note = Round 1 (Selectivity)
MVSAHFILVHTICHGAWLWYKLIPLLQSAGHNATAIDLVASGIDPRQLEQIGTWEQYSEPLFTLIESIPEGKKVILVGESGGGINIALAAEKYPEKVSALVFHNALMPDIDHSPAFVYKKFSEVFTDWKDSIFSNYTYGNDTVTAVELGDRTLAENIFSNSPIEDVELAKHLVRKGSFFEQDLDTLPNFTSEGYGSIRRVYVYGEEDQIFSRDFQLWMINNYKPDKVYCVPSADHKIQFSKVNELAQILQEVANSASDLLAVA

SEQ ID NO: 413 - DNA, 789 bp, synthetic construct
  misc_feature 1..789: note = Round 1 (Selectivity)
  source 1..789: mol_type = other DNA
atggttagtgcgcattttattctgatccacaccatttgccatggcgcctggctctggtataaactgatcccgttattacagtctgcaggtcataacgtcacggcgattgatcttgtggctagcgggatcgaccctcgccaactggaacagattggcacatgggagcagtactcagaaccattgttcaccctgatcgaatcgatcccggaaggtgagaaagtcattctggtaggagaatccggtggcggcatcaatattgcactggccgcggagaaatatccggagaaagttagcgccctcgtctttcacaacgcacttatgcccgatatcgatcacagtccagcgttcgtgtacaagaaatttagcgaagttttcactgactggaaagattcgatcttcagcaattatacctacggtaacgacacggttaccgcggtggaattgggagatcgtactctggccgagaacatctactccaattctccgattgaagatgtagaactggcgaaacatctggtccgcaagggctccttctttgagcaagacttggataccctgccgaactttacgtcggaagggtatggttcaattcgtcgtgtgtatgtttacggcgaagaagaccagatctttagccgcgattttcagttatggcaaattaataattataagcctgataaagtgtactgtgtaccgagtgctgaccacaagatccagtttagcaaagtcaacgagctggcccagattctccaagaagttgcaaactctgcgagtgatcttcttgcagtggct

SEQ ID NO: 414 - protein, 263 aa, synthetic construct
  REGION 1..263: note = Round 1 (Selectivity)
MVSAHFILIHTICHGAWLWYKLIPLLQSAGHNVTAIDLVASGIDPRQLEQIGTWEQYSEPLFTLIESIPEGEKVILVGESGGGINIALAAEKYPEKVSALVFHNALMPDIDHSPAFVYKKFSEVFTDWKDSIFSNYTYGNDTVTAVELGDRTLAENIYSNSPIEDVELAKHLVRKGSFFEQDLDTLPNFTSEGYGSIRRVYVYGEEDQIFSRDFQLWQINNYKPDKVYCVPSADHKIQFSKVNELAQILQEVANSASDLLAVA

SEQ ID NO: 415 - DNA, 789 bp, synthetic construct
  misc_feature 1..789: note = Round 1 (Selectivity)
  source 1..789: mol_type = other DNA
atggttagtgcgcattttattctgatccacaccatttgccatggcgcctggctctggtataaactgatcccgttattacagtctgcaggtcataacgctacggcgattgatcttgtggctagcgggatcgaccctcgccaactggaacagattggcacatgggagcagtactcagaaccattgttcaccctgatcgaatcgattccggaaggtaagaaagtcattctggtaggagaatccggtggcggcatcaatattgcactggccgcggagaaatatccggagaaagtgagcgccctcgtctttcacaacgcacttatgcccgatatcgatcacagtccagcgttcgtgtacaagaaatttagcgaagttttcactgactggaaagattcgatcttcagcaattatacctacggtaacgacacggttaccgcggtggaattgggagatcgtactctggccgagaacatcttctccaattctccgattgaagatgtagaactggcgaaacatctggtccgcaaaggctccttctttgagcaagacttggataccctgccgaactttacgtcggaagggtatggttcaattcgtcgtgtgtatgtttacggcgaagaagacgagatctttagccgcgattttcagttatggcaaattaataattataagcctgataaagtgtactgtgtaccgagtgctgaccacaagattcagatcagcaaagtcaacgagctggcccagattctccaagaagttgcaaactctgcgagtgatcttcttgcagtggct

SEQ ID NO: 416 - protein, 263 aa, synthetic construct
  REGION 1..263: note = Round 1 (Selectivity)
MVSAHFILIHTICHGAWLWYKLIPLLQSAGHNATAIDLVASGIDPRQLEQIGTWEQYSEPLFTLIESIPEGKKVILVGESGGGINIALAAEKYPEKVSALVFHNALMPDIDHSPAFVYKKFSEVFTDWKDSIFSNYTYGNDTVTAVELGDRTLAENIFSNSPIEDVELAKHLVRKGSFFEQDLDTLPNFTSEGYGSIRRVYVYGEEDEIFSRDFQLWQINNYKPDKVYCVPSADHKIQISKVNELAQILQEVANSASDLLAVA

SEQ ID NO: 417 - DNA, 789 bp, synthetic construct
  misc_feature 1..789: note = Round 1 (Selectivity)
  source 1..789: mol_type = other DNA
atggttagtgcgcattttattctgatccacaccatttgccatggcgcctggctctggtataaactgatcccgttattacagtctgcaggtcataacgctacggcgattgatcttgtggctagcgggatcgaccctcgccaactggaacagattggcacatgggagcagtactcagaaccattgttcaccctgatcgaatcgattccggaaggtaagaaagtcattctggtaggagaatccggtggcggcatcaatattgcactggccgcggagaaatatccggagaaagtgagcgccctcgtctttcacaacgcacttatgcccgatatcgatcacagtccagcgttcgtgtacaagaaatttagcgaagttttcactgactggaaagattcgatcttcagcaattatacctacggtaacgacacggttaccgcggtggaattgggagatcgtactctggccgagaacatcttctccaattctccgattgaagatgtagaactggcgaaacatctggtccgcaaaggctccttctttgagtgtgacttggataccctgccgaactttacgtcggaagggtatggttcaattcgtcgtgtgtatgtttacggcgaagaagaccagatctttagccgcgattttcagttatggcaaattaataattataagcctgataaagtgtactgtgtaccgagtgctgaccacaagattcagatcagcaaagtcaacgagctggcccagattctccaagaagttgcaaactctgcgagtgatcttcttgcagtggct

SEQ ID NO: 418 - protein, 263 aa, synthetic construct
  REGION 1..263: note = Round 1 (Selectivity)
MVSAHFILIHTICHGAWLWYKLIPLLQSAGHNATAIDLVASGIDPRQLEQIGTWEQYSEPLFTLIESIPEGKKVILVGESGGGINIALAAEKYPEKVSALVFHNALMPDIDHSPAFVYKKFSEVFTDWKDSIFSNYTYGNDTVTAVELGDRTLAENIFSNSPIEDVELAKHLVRKGSFFECDLDTLPNFTSEGYGSIRRVYVYGEEDQIFSRDFQLWQINNYKPDKVYCVPSADHKIQISKVNELAQILQEVANSASDLLAVA

SEQ ID NO: 419 - DNA, 789 bp, synthetic construct
  misc_feature 1..789: note = Round 1 (Selectivity)
  source 1..789: mol_type = other DNA
atggttagtgcgcattttattctgatccacaccatttgccatggcgcctggctctggtataaactgatcccgttattacagtctgcaggtcataacgctacggcgattgatcttgtggctagcgggatcgaccctcgccaactggaacagattggcacatgggagcagtactcagaaccattgttcaccctgatcgaatcgattccggaaggtaagaaagtcattctggtaggagaatccggtggcggcatcaatattgcactggccgcggagaaatatccggagaaagtgagcgccctcgtctttcacaacgcacttatgcccgatatcgatcacagtccagcgttcgtgtacaagaaatttggggaagttttcactgactggaaagattcgatcttcagcaattatacctacggtaacgacacggttaccgcggtggaattgggagatcgtactctggccgagaacatcttctccaattctccgattgaagatgtagaactggcgaaacatctggtccgcaaaggctccttctttgagcaagacttggataccctgccgaactttacgtcggaagggtatggttcaattcgtcgtgtgtatgtttacggcgaagaagaccagatctttagccgcgattttcagttatggcaaattaataattataagcctgataaagtgtactgtgtaccgagtgctgaccacaagattcagatcagcaaagtcaacgagctggcccagattctccaagaagttgcaaactctgcgagtgatcttcttgcagtggct

SEQ ID NO: 420 - protein, 263 aa, synthetic construct
  REGION 1..263: note = Round 1 (Selectivity)
MVSAHFILIHTICHGAWLWYKLIPLLQSAGHNATAIDLVASGIDPRQLEQIGTWEQYSEPLFTLIESIPEGKKVILVGESGGGINIALAAEKYPEKVSALVFHNALMPDIDHSPAFVYKKFGEVFTDWKDSIFSNYTYGNDTVTAVELGDRTLAENIFSNSPIEDVELAKHLVRKGSFFEQDLDTLPNFTSEGYGSIRRVYVYGEEDQIFSRDFQLWQINNYKPDKVYCVPSADHKIQISKVNELAQILQEVANSASDLLAVA

SEQ ID NO: 421 - DNA, 789 bp, synthetic construct
  misc_feature 1..789: note = Round 1 (Selectivity)
  source 1..789: mol_type = other DNA
atggttagtgcgcattttattctgatccacaccatttgccatggcgcctggctctggtataaactgatcccgttattacagtctgcaggtcataacgctacggcgattgatcttgtggctagcgggatcgaccctcgccaactggaacagattggcacatgggagcagtactcagaaccattgttcaccctgatcgaatcgattccggaaggtaagaaagtcattctggtaggagaatccggtggcggcatcaatattgcactggccgcggagaaatatccggagaaagtgagcgccctcgtctttcacaacgcacttatgcccgatatcgatcacagtccagcgttcgtgtacaagaaatttagcgaagttttcactgactggaaagattcgatcttcagcaattatacctacggtaacgacacggttaccgcggtggaattgggagtgcgtactctggccgagaacatcttctccaattctccgattgaagatgtagaactggcgaaacatctggtccgcaaaggctccttctttgagcaagacttggataccctgccgaactttacgtcggaagggtatggttcaattcgtcgtgtgtatgtttacggcgaagaagaccagatctttagccgcgattttcagttatggcaaattaataattataagcctgataaagtgtactgtgtaccgagtgctgaccacaagattcagatcagcaaagtcaacgagctggcccagattctccaagaagttgcaaactctgcgagtgatcttcttgcagtggct

SEQ ID NO: 422 - protein, 263 aa, synthetic construct
  REGION 1..263: note = Round 1 (Selectivity)
MVSAHFILIHTICHGAWLWYKLIPLLQSAGHNATAIDLVASGIDPRQLEQIGTWEQYSEPLFTLIESIPEGKKVILVGESGGGINIALAAEKYPEKVSALVFHNALMPDIDHSPAFVYKKFSEVFTDWKDSIFSNYTYGNDTVTAVELGVRTLAENIFSNSPIEDVELAKHLVRKGSFFEQDLDTLPNFTSEGYGSIRRVYVYGEEDQIFSRDFQLWQINNYKPDKVYCVPSADHKIQISKVNELAQILQEVANSASDLLAVA

SEQ ID NO: 423 - DNA, 789 bp, synthetic construct
  misc_feature 1..789: note = Round 1 (Selectivity)
  source 1..789: mol_type = other DNA
atggttagtgcgcattttattctgatccacaccatttgccatggcgcctggctctggtataaactgatcccgttattacagtctgcaggtcataacgctacggcgattgatcttgtggctagcgggatcgaccctcgccaactggaacagattggcacatgggagcagtactcagaaccattgttcaccctgatcgaatcgattccggaaggtaagaaagtcattctggtaggagaatccggtggcggcatcaatattgcactggccgcggagaaatatccggagaaagtgagcgccctcgtctttcacaacgcacttatgcccgatatcgatcacagtccagcgttcgtgtacaagaaatttagcgaagttttcactctttggaaagattcgatcttcagcaattatacctacggtaacgacacggttaccgcggtggaattgggagatcgtactctggccgagaacatcttctccaattctccgattgaagatgtagaactggcgaaacatctggtccgcaaaggctccttctttgagcaagacttggataccctgccgaactttacgtcggaagggtatggttcaattcgtcgtgtgtatgtttacggcgaagaagaccagatctttagccgcgattttcagttatggcaaattaataattataagcctgataaagtgtactgtgtaccgagtgctgaccacaagattcagatcagcaaagtcaacgagctggcccagattctccaagaagttgcaaactctgcgagtgatcttcttgcagtggct

SEQ ID NO: 424 - protein, 263 aa, synthetic construct
  REGION 1..263: note = Round 1 (Selectivity)
MVSAHFILIHTICHGAWLWYKLIPLLQSAGHNATAIDLVASGIDPRQLEQIGTWEQYSEPLFTLIESIPEGKKVILVGESGGGINIALAAEKYPEKVSALVFHNALMPDIDHSPAFVYKKFSEVFTLWKDSIFSNYTYGNDTVTAVELGDRTLAENIFSNSPIEDVELAKHLVRKGSFFEQDLDTLPNFTSEGYGSIRRVYVYGEEDQIFSRDFQLWQINNYKPDKVYCVPSADHKIQISKVNELAQILQEVANSASDLLAVA

SEQ ID NO: 425 - DNA, 789 bp, synthetic construct
  misc_feature 1..789: note = Round 1 (Selectivity)
  source 1..789: mol_type = other DNA
atggttagtgcgcattttattctgatccacaccatttgccatggcgcctggctctggtataaactgatcccgttattacagtctgcaggtcataacgctacggcgattgatcttgtggctagcgggatcgaccctcgccaactggaacagactggcacatgggagcagtactcagaaccattgttcaccctgatcgaatcgattccggaaggtaagaaagtcattctggtaggagaatccggtggcggcatcaatattgcactggccgcggagaaatatccggagaaagtgagcgccctcgtctttcacaacgcacttatgcccgatatcgatcacagtccagcgttcgtgtacaagaaatttagcgaagttttcactgactggaaagattcgatcttcagcaattatacctacggtaacgacacggttaccgcggtggaattgggagatcgtactctggccgagaacatcttctccaattctccgattgaagatgtagaactggcgaaacatctggtccgcaaaggctccttctttgagcaagacttggataccctgccgaactttacgtcggaagggtatggttcaattcgtcgtgtgtatgtttacggcgaagaagaccagatctttagccgcgattttcagttatggcaaattaataattataagcctgataaagtgtactgtgtaccgagtgctgaccacaagattcagatcagcaaagtcaacgagctggcccagattctccaagaagttgcaaactctgcgagtgatcttcttgcagtggct

SEQ ID NO: 426 - protein, 263 aa, synthetic construct
  REGION 1..263: note = Round 1 (Selectivity)
MVSAHFILIHTICHGAWLWYKLIPLLQSAGHNATAIDLVASGIDPRQLEQTGTWEQYSEPLFTLIESIPEGKKVILVGESGGGINIALAAEKYPEKVSALVFHNALMPDIDHSPAFVYKKFSEVFTDWKDSIFSNYTYGNDTVTAVELGDRTLAENIFSNSPIEDVELAKHLVRKGSFFEQDLDTLPNFTSEGYGSIRRVYVYGEEDQIFSRDFQLWQINNYKPDKVYCVPSADHKIQISKVNELAQILQEVANSASDLLAVA

SEQ ID NO: 427 - DNA, 789 bp, synthetic construct
  misc_feature 1..789: note = Round 1 (Selectivity)
  source 1..789: mol_type = other DNA
atggttagtgcgcattttattctgatccacaccatttgccatggcgcctggctctggtataaactgatcccgttattacagtctgcaggtcataacgctacggcgattgatcttgtggctagcgggatcgaccctcgccaactgcagcagattggcacatgggagcagtactcagaaccattgttcaccctgatcgaatcgattccggaaggtaagaaagtcattctggtaggagaatccggtggcggcatcaatattgcactggccgcggagaaatatccggagaaagtgagcgccctcgtctttcacaacgcacttatgcccgatatcgatcacagtccagcgttcgtgtacaagaaatttagcgaagttttcactgactggaaagattcgatcttcagcaattatacctacggtaacgacacggttaccgcggtggaattgggagatcgtactctggccgagaacatcttctccaattctccgattgaagatgtagaactggcgaaacatctggtccgcaaaggctccttctttgagcaagacttggataccctgccgaactttacgtcggaagggtatggttcaattcgtcgtgtgtatgtttacggcgaagaagaccagatctttagccgcgattttcagttatggcaaattaataattataagcctgataaagtgtactgtgtaccgagtgctgaccacaagattcagatcagcaaagtcaacgagctggcccagattctccaagaagttgcaaactctgcgagtgatcttcttgcagtggct

SEQ ID NO: 428 - protein, 263 aa, synthetic construct
  REGION 1..263: note = Round 1 (Selectivity)
MVSAHFILIHTICHGAWLWYKLIPLLQSAGHNATAIDLVASGIDPRQLQQIGTWEQYSEPLFTLIESIPEGKKVILVGESGGGINIALAAEKYPEKVSALVFHNALMPDIDHSPAFVYKKFSEVFTDWKDSIFSNYTYGNDTVTAVELGDRTLAENIFSNSPIEDVELAKHLVRKGSFFEQDLDTLPNFTSEGYGSIRRVYVYGEEDQIFSRDFQLWQINNYKPDKVYCVPSADHKIQISKVNELAQILQEVANSASDLLAVA

SEQ ID NO: 429 - DNA, 789 bp, synthetic construct
  misc_feature 1..789: note = Round 1 (Selectivity)
  source 1..789: mol_type = other DNA
atggttagtgcgcattttattctgatccacaccatttgccatggcgcctggctctggtataaactgatcccgttattacagtctgcaggtcataacgctacggcgattgatcttgtggctagcgggatcgaccctcgccaactggaacagattggcacatgggagcagtactcagaaccattgttcaccctgatcgaatcgattccggaaggtaagaaagtcattctggtaggagaatccggtggcggcctgaatattgcactggccgcggagaaatatccggagaaagtgagcgccctcgtctttcacaacgcacttatgcccgatatcgatcacagtccagcgttcgtgtacaagaaatttagcgaagttttcactgactggaaagattcgatcttcagcaattatacctacggtaacgacacggttaccgcggtggaattgggagatcgtactctggccgagaacatcttctccaattctccgattgaagatgtagaactggcgaaacatctggtccgcaaaggctccttctttgagcaagacttggataccctgccgaactttacgtcggaagggtatggttcaattcgtcgtgtgtatgtttacggcgaagaagaccagatctttagccgcgattttcagttatggcaaattaataattataagcctgataaagtgtactgtgtaccgagtgctgaccacaagattcagatcagcaaagtcaacgagctggcccagattctccaagaagttgcaaactctgcgagtgatcttcttgcagtggct

SEQ ID NO: 430 - protein, 263 aa, synthetic construct
  REGION 1..263: note = Round 1 (Selectivity)
MVSAHFILIHTICHGAWLWYKLIPLLQSAGHNATAIDLVASGIDPRQLEQIGTWEQYSEPLFTLIESIPEGKKVILVGESGGGLNIALAAEKYPEKVSALVFHNALMPDIDHSPAFVYKKFSEVFTDWKDSIFSNYTYGNDTVTAVELGDRTLAENIFSNSPIEDVELAKHLVRKGSFFEQDLDTLPNFTSEGYGSIRRVYVYGEEDQIFSRDFQLWQINNYKPDKVYCVPSADHKIQISKVNELAQILQEVANSASDLLAVA

SEQ ID NO: 431 - DNA, 789 bp, synthetic construct
  misc_feature 1..789: note = Round 1 (Selectivity)
  source 1..789: mol_type = other DNA
atggttagtgcgcattttattctgatccacaccatttgccatggcgcctggctctggtataaactgatcccgttattacagtctgcaggtcataacgctacggcgattgatcttgtggctagcgggatcgaccctcgccaactggaacagattggcacatgggagcagtactcagaaccattgttcaccctgatcgaatcgattccggaaggtaagaaagtcattctggtaggagaatccggtggcggcatcaatattgcactggccgcggagaaatatccggagaaagtgagcgccctcgtctttcacaacgcacttatgcccgatatcgatcacagtccagcgttcgtgtacaagaaatttagcgaagttttcactgactggaaagattcgatcttcgttaattatacctacggtaacgacacggttaccgcggtggaattgggagatcgtactctggccgagaacatcttctccaattctccgattgaagatgtagaactggcgaaacatctggtccgcaaaggctccttctttgagcaagacttggataccctgccgaactttacgtcggaagggtatggttcaattcgtcgtgtgtatgtttacggcgaagaagaccagatctttagccgcgattttcagttatggcaaattaataattataagcctgataaagtgtactgtgtaccgagtgctgaccacaagattcagatcagcaaagtcaacgagctggcccagattctccaagaagttgcaaactctgcgagtgatcttcttgcagtggct

SEQ ID NO: 432 - protein, 263 aa, synthetic construct
  REGION 1..263: note = Round 1 (Selectivity)
MVSAHFILIHTICHGAWLWYKLIPLLQSAGHNATAIDLVASGIDPRQLEQIGTWEQYSEPLFTLIESIPEGKKVILVGESGGGINIALAAEKYPEKVSALVFHNALMPDIDHSPAFVYKKFSEVFTDWKDSIFVNYTYGNDTVTAVELGDRTLAENIFSNSPIEDVELAKHLVRKGSFFEQDLDTLPNFTSEGYGSIRRVYVYGEEDQIFSRDFQLWQINNYKPDKVYCVPSADHKIQISKVNELAQILQEVANSASDLLAVA

SEQ ID NO: 433 - DNA, 789 bp, synthetic construct
  misc_feature 1..789: note = Round 1 (Selectivity)
  source 1..789: mol_type = other DNA
atggttagtgcgcattttattctgatccacaccatttgccatggcgcctggctctggtataaactgatcccgttattacagtctgcaggtcataacgctacggcgattgatcttgtggctagcgggatcgaccctcgccaactggaacagattggcacatgggagcagtactcagaaccattgttcaccctgatcgaatcgattccggaaggtaagaaagtcattctggtaggagaatccggtggcggcatcaatattgcactggccgcggagaaatatccggagaaagtgagcgccctcgtctttcacaacgcacttatgcccgatatcgatcacagtccagcgttcgtgtacaagaaatttagcgaagttttcactgactggaaagattcgatcttcagcaattatacctacggtaacgacacggttaccgcggtggaattgggagatcgtactctggccgagaacatcttctccaattctccgattgaagatgtagaactggcgaaacatctggtccgcaaaggctccttctttgttcaagacttggataccctgccgaactttacgtcggaagggtatggttcaattcgtcgtgtgtatgtttacggcgaagaagaccagatctttagccgcgattttcagttatggcaaattaataattataagcctgataaagtgtactgtgtaccgagtgctgaccacaagattcagatcagcaaagtcaacgagctggcccagattctccaagaagttgcaaactctgcgagtgatcttcttgcagtggct

SEQ ID NO: 434 - protein, 263 aa, synthetic construct
  REGION 1..263: note = Round 1 (Selectivity)
MVSAHFILIHTICHGAWLWYKLIPLLQSAGHNATAIDLVASGIDPRQLEQIGTWEQYSEPLFTLIESIPEGKKVILVGESGGGINIALAAEKYPEKVSALVFHNALMPDIDHSPAFVYKKFSEVFTDWKDSIFSNYTYGNDTVTAVELGDRTLAENIFSNSPIEDVELAKHLVRKGSFFVQDLDTLPNFTSEGYGSIRRVYVYGEEDQIFSRDFQLWQINNYKPDKVYCVPSADHKIQISKVNELAQILQEVANSASDLLAVA

SEQ ID NO: 435 - DNA, 789 bp, synthetic construct
  misc_feature 1..789: note = Round 1 (Selectivity)
  source 1..789: mol_type = other DNA
atggttagtgcgcattttattctgatccacaccatttgccatggcgcctggctctggtataaactgatcccgttattacagtctgcaggtcataacgctacggcgattgatcttgtggctagcgggatcgaccctcgccaactggaacagattggcacatgggagcagtactcagaaccattgttcaccctgatcgaatcgattccggaaggtaagaaagtcattctggtaggagaatccggtggcggcatcaatattgcactggccgcggagaaatatccggagaaagtgagcgccctcgtctttcacaacgcacttatgcccgatatcgatcacagtccagcgttcgtgtacaagaaatttagcgcggttttcactgactggaaagattcgatcttcagcaattatacctacggtaacgacacggttaccgcggtggaattgggagatcgtactctggccgagaacatcttctccaattctccgattgaagatgtagaactggcgaaacatctggtccgcaaaggctccttctttgagcaagacttggataccctgccgaactttacgtcggaagggtatggttcaattcgtcgtgtgtatgtttacggcgaagaagaccagatctttagccgcgattttcagttatggcaaattaataattataagcctgataaagtgtactgtgtaccgagtgctgaccacaagattcagatcagcaaagtcaacgagctggcccagattctccaagaagttgcaaactctgcgagtgatcttcttgcagtggct

SEQ ID NO: 436 - protein, 263 aa, synthetic construct
  REGION 1..263: note = Round 1 (Selectivity)
MVSAHFILIHTICHGAWLWYKLIPLLQSAGHNATAIDLVASGIDPRQLEQIGTWEQYSEPLFTLIESIPEGKKVILVGESGGGINIALAAEKYPEKVSALVFHNALMPDIDHSPAFVYKKFSAVFTDWKDSIFSNYTYGNDTVTAVELGDRTLAENIFSNSPIEDVELAKHLVRKGSFFEQDLDTLPNFTSEGYGSIRRVYVYGEEDQIFSRDFQLWQINNYKPDKVYCVPSADHKIQISKVNELAQILQEVANSASDLLAVA

SEQ ID NO: 437 - DNA, 789 bp, synthetic construct
  misc_feature 1..789: note = Round 1 (Selectivity)
  source 1..789: mol_type = other DNA
atggttagtgcgcattttattctgatccacaccatttgccatggcgcctggctctggtataaactgatcccgttattacagtctgcaggtcataacgctacggcgattgatcttgtggctagcgggatcgaccctcgccaactggaacagattggcacatgggagcagtactcagaaccattgttcaccctgatcgaatcgattccggaaggtaagaaagtcattctggtaggagaatccggtggcggcatcaatattgcactggccgcggagaaatatccggagaaagtgagcgccctcgtctttcacaacgcacttatgcccgatatcgatcacagtccagcgttcgtgtacaagaaatttagcgaagttttcactgactggaaagattcgatcttcagcaattatacctacggtaacgacacggttaccgcggtggaattgggagatcgtactctggccgagaacatcttctccaattctccgattgaagatgtagaactggcgaaacatctggagcgcaaaggctccttctttgagcaagacttggataccctgccgaactttacgtcggaagggtatggttcaattcgtcgtgtgtatgtttacggcgaagaagaccagatctttagccgcgattttcagttatggcaaattaataattataagcctgataaagtgtactgtgtaccgagtgctgaccacaagattcagatcagcaaagtcaacgagctggcccagattctccaagaagttgcaaactctgcgagtgatcttcttgcagtggct

SEQ ID NO: 438 - protein, 263 aa, synthetic construct
  REGION 1..263: note = Round 1 (Selectivity)
MVSAHFILIHTICHGAWLWYKLIPLLQSAGHNATAIDLVASGIDPRQLEQIGTWEQYSEPLFTLIESIPEGKKVILVGESGGGINIALAAEKYPEKVSALVFHNALMPDIDHSPAFVYKKFSEVFTDWKDSIFSNYTYGNDTVTAVELGDRTLAENIFSNSPIEDVELAKHLERKGSFFEQDLDTLPNFTSEGYGSIRRVYVYGEEDQIFSRDFQLWQINNYKPDKVYCVPSADHKIQISKVNELAQILQEVANSASDLLAVA

SEQ ID NO: 439 - DNA, 789 bp, synthetic construct
  misc_feature 1..789: note = Round 1 (Selectivity)
  source 1..789: mol_type = other DNA
atggttagtgcgcattttattctgatccacaccatttgccatggcgcctggctctggtataaactgatcccgttattacagtctgcaggtcataacgctacggcgattgatcttgtggctagcgggatcgaccctcgccaactggaacagattggcacatgggagcagtactcagaaccattgttcaccctgatcgaatcgattccggaaggtaagaaagtcattctggtaggagaatccggtggcggcatcaatattgcactggccgcggagaaatatccggagaaagtgagcgccctcgtctttcacaacgcacttatgcccgatatcgatcacagtccagcgttcgtgtacaagaaatttagcgaagttttcactgactggaaagattcgatcttcagcaattatacctacggtaacgacacggttaccgcggtgaggttgggagatcgtactctggccgagaacatcttctccaattctccgattgaagatgtagaactggcgaaacatctggtccgcaaaggctccttctttgagcaagacttggataccctgccgaactttacgtcggaagggtatggttcaattcgtcgtgtgtatgtttacggcgaagaagaccagatctttagccgcgattttcagttatggcaaattaataattataagcctgataaagtgtactgtgtaccgagtgctgaccacaagattcagatcagcaaagtcaacgagctggcccagattctccaagaagttgcaaactctgcgagtgatcttcttgcagtggct

SEQ ID NO: 440 - protein, 263 aa, synthetic construct
  REGION 1..263: note = Round 1 (Selectivity)
MVSAHFILIHTICHGAWLWYKLIPLLQSAGHNATAIDLVASGIDPRQLEQIGTWEQYSEPLFTLIESIPEGKKVILVGESGGGINIALAAEKYPEKVSALVFHNALMPDIDHSPAFVYKKFSEVFTDWKDSIFSNYTYGNDTVTAVRLGDRTLAENIFSNSPIEDVELAKHLVRKGSFFEQDLDTLPNFTSEGYGSIRRVYVYGEEDQIFSRDFQLWQINNYKPDKVYCVPSADHKIQISKVNELAQILQEVANSASDLLAVA

SEQ ID NO: 441 - DNA, 789 bp, synthetic construct
  misc_feature 1..789: note = Round 1 (Selectivity)
  source 1..789: mol_type = other DNA
atggttagtgcgcattttattctgatccacaccatttgccatggcgcctggctctggtataaactgatcccgttattacagtctgcaggtcataacgctacggcgattgatcttgtggctagcgggatcgaccctcgccaactggaacagattggcacatgggagcagtactcagaaccattgttcaccctgatcgaatcgattccggaaggtaagaaagtcattctggtaggagaatccggtggcggcatcaatattgcactggccgcggagaaatatccggagaaagtgagcgccctcgtctttcacaacgcacttatgcccgatatcgatcacagtccagcgttcgtgtacaagaaatttagcgaagttttcactatgtggaaagattcgatcttcagcaattatacctacggtaacgacacggttaccgcggtggaattgggagatcgtactctggccgagaacatcttctccaattctccgattgaagatgtagaactggcgaaacatctggtccgcaaaggctccttctttgagcaagacttggataccctgccgaactttacgtcggaagggtatggttcaattcgtcgtgtgtatgtttacggcgaagaagaccagatctttagccgcgattttcagttatggcaaattaataattataagcctgataaagtgtactgtgtaccgagtgctgaccacaagattcagatcagcaaagtcaacgagctggcccagattctccaagaagttgcaaactctgcgagtgatcttcttgcagtggct

SEQ ID NO: 442 - protein, 263 aa, synthetic construct
  REGION 1..263: note = Round 1 (Selectivity)
MVSAHFILIHTICHGAWLWYKLIPLLQSAGHNATAIDLVASGIDPRQLEQIGTWEQYSEPLFTLIESIPEGKKVILVGESGGGINIALAAEKYPEKVSALVFHNALMPDIDHSPAFVYKKFSEVFTMWKDSIFSNYTYGNDTVTAVELGDRTLAENIFSNSPIEDVELAKHLVRKGSFFEQDLDTLPNFTSEGYGSIRRVYVYGEEDQIFSRDFQLWQINNYKPDKVYCVPSADHKIQISKVNELAQILQEVANSASDLLAVA

SEQ ID NO: 443 - DNA, 789 bp, synthetic construct
  misc_feature 1..789: note = Round 1 (Selectivity)
  source 1..789: mol_type = other DNA
atggttagtgcgcattttattctgatccacaccatttgccatggcgcctggctctggtataaactgatcccgttattacagtctgcaggtcataacgctacggcgattgatcttagggctagcgggatcgaccctcgccaactggaacagattggcacatgggagcagtactcagaaccattgttcaccctgatcgaatcgattccggaaggtaagaaagtcattctggtaggagaatccggtggcggcatcaatattgcactggccgcggagaaatatccggagaaagtgagcgccctcgtctttcacaacgcacttatgcccgatatcgatcacagtccagcgttcgtgtacaagaaatttagcgaagttttcactgactggaaagattcgatcttcagcaattatacctacggtaacgacacggttaccgcggtggaattgggagatcgtactctggccgagaacatcttctccaattctccgattgaagatgtagaactggcgaaacatctggtccgcaaaggctccttctttgagcaagacttggataccctgccgaactttacgtcggaagggtatggttcaattcgtcgtgtgtatgtttacggcgaagaagaccagatctttagccgcgattttcagttatggcaaattaataattataagcctgataaagtgtactgtgtaccgagtgctgaccacaagattcagatcagcaaagtcaacgagctggcccagattctccaagaagttgcaaactctgcgagtgatcttcttgcagtggct

SEQ ID NO: 444 - protein, 263 aa, synthetic construct
  REGION 1..263: note = Round 1 (Selectivity)
MVSAHFILIHTICHGAWLWYKLIPLLQSAGHNATAIDLRASGIDPRQLEQIGTWEQYSEPLFTLIESIPEGKKVILVGESGGGINIALAAEKYPEKVSALVFHNALMPDIDHSPAFVYKKFSEVFTDWKDSIFSNYTYGNDTVTAVELGDRTLAENIFSNSPIEDVELAKHLVRKGSFFEQDLDTLPNFTSEGYGSIRRVYVYGEEDQIFSRDFQLWQINNYKPDKVYCVPSADHKIQISKVNELAQILQEVANSASDLLAVA

SEQ ID NO: 445 - DNA, 789 bp, synthetic construct
  misc_feature 1..789: note = Round 1 (Selectivity)
  source 1..789: mol_type = other DNA
atggttagtgcgcattttattctgatccacaccatttgccatggcgcctggctctggtataaactgatcccgttattacagtctgcaggtcataacgctacggcgattgatcttgtggctagcgggatcgaccctcgccaactggaacagattggcacatgggagcagtactcagaaccattgttcaccctgatcgaatcgattccggaaggtaagaaagtcattctggtaggagaatccggtggcggcatcaatattgcactggccgcggagaaatatccggagaaagtgagcgccctcgtctttcacaacgcacttatgcccgatatcgatcacagtccagcgttcgtgtacaagaaatttagcgaagttttcactgactggaaagattcgatcttctttaattatacctacggtaacgacacggttaccgcggtggaattgggagatcgtactctggccgagaacatcttctccaattctccgattgaagatgtagaactggcgaaacatctggtccgcaaaggctccttctttgagcaagacttggataccctgccgaactttacgtcggaagggtatggttcaattcgtcgtgtgtatgtttacggcgaagaagaccagatctttagccgcgattttcagttatggcaaattaataattataagcctgataaagtgtactgtgtaccgagtgctgaccacaagattcagatcagcaaagtcaacgagctggcccagattctccaagaagttgcaaactctgcgagtgatcttcttgcagtggct

SEQ ID NO: 446 - protein, 263 aa, synthetic construct
  REGION 1..263: note = Round 1 (Selectivity)
MVSAHFILIHTICHGAWLWYKLIPLLQSAGHNATAIDLVASGIDPRQLEQIGTWEQYSEPLFTLIESIPEGKKVILVGESGGGINIALAAEKYPEKVSALVFHNALMPDIDHSPAFVYKKFSEVFTDWKDSIFFNYTYGNDTVTAVELGDRTLAENIFSNSPIEDVELAKHLVRKGSFFEQDLDTLPNFTSEGYGSIRRVYVYGEEDQIFSRDFQLWQINNYKPDKVYCVPSADHKIQISKVNELAQILQEVANSASDLLAVA

SEQ ID NO: 447 - DNA, 789 bp, synthetic construct
  misc_feature 1..789: note = Round 1 (Selectivity)
  source 1..789: mol_type = other DNA
atggttagtgcgcattttattctgatccacaccatttgccatggcgcctggctctggtataaactgatcccgttattacagtctgcaggtcataacgctacggcgattgatcttgtggctagcgggatcgaccctcgccaactggaacagattggcacatgggagcagtactcagaaccattgttcaccctgatcgaatcgattccggaaggtaagaaagtcattctggtaggagaatccggtggcggcatcaatattgcactggccgcggagaaatatccggagaaagtgagcgccctcgtctttcacaacgcacttatgcccgatatcgatcacagtccagcgttcgtgtacaagaaatttagcgaagttttcactgactggaaagattcgatcttcagcaattatacctacggtaacgacacggttaccgcggtggaagtgggagatcgtactctggccgagaacatcttctccaattctccgattgaagatgtagaactggcgaaacatctggtccgcaaaggctccttctttgagcaagacttggataccctgccgaactttacgtcggaagggtatggttcaattcgtcgtgtgtatgtttacggcgaagaagaccagatctttagccgcgattttcagttatggcaaattaataattataagcctgataaagtgtactgtgtaccgagtgctgaccacaagattcagatcagcaaagtcaacgagctggcccagattctccaagaagttgcaaactctgcgagtgatcttcttgcagtggct

SEQ ID NO: 448 - protein, 263 aa, synthetic construct
  REGION 1..263: note = Round 1 (Selectivity)
MVSAHFILIHTICHGAWLWYKLIPLLQSAGHNATAIDLVASGIDPRQLEQIGTWEQYSEPLFTLIESIPEGKKVILVGESGGGINIALAAEKYPEKVSALVFHNALMPDIDHSPAFVYKKFSEVFTDWKDSIFSNYTYGNDTVTAVEVGDRTLAENIFSNSPIEDVELAKHLVRKGSFFEQDLDTLPNFTSEGYGSIRRVYVYGEEDQIFSRDFQLWQINNYKPDKVYCVPSADHKIQISKVNELAQILQEVANSASDLLAVA

SEQ ID NO: 449 - DNA, 789 bp, synthetic construct
  misc_feature 1..789: note = Round 1 (Selectivity)
  source 1..789: mol_type = other DNA
atggttagtgcgcattttattctgatccacaccatttgccatggcgcctggctctggtataaactgatcccgttattacagtctgcaggtcataacgctacggcgattgatcttgtggctagcgggatcgaccctcgccaactggaacagattggcacatgggagcagtactcagaaccattgttcaccctgatcgaatcgattccggaaggtaagaaagtcattctggtaggagaatccggtggcggcatcaatattgcactggccgcggagaaatatccggagaaagtgagcgccctcgtctttcacaacgcacttatgcccgatatcgatcacagtccagcgttcgtgtacaagaaatttagcgaagttttcactgactggaaagattcgatcttcagcaattatacctacggtaacgacacggttaccctggtggaattgggagatcgtactctggccgagaacatcttctccaattctccgattgaagatgtagaactggcgaaacatctggtccgcaaaggctccttctttgagcaagacttggataccctgccgaactttacgtcggaagggtatggttcaattcgtcgtgtgtatgtttacggcgaagaagaccagatctttagccgcgattttcagttatggcaaattaataattataagcctgataaagtgtactgtgtaccgagtgctgaccacaagattcagatcagcaaagtcaacgagctggcccagattctccaagaagttgcaaactctgcgagtgatcttcttgcagtggct

SEQ ID NO: 450 - protein, 263 aa, synthetic construct
  REGION 1..263: note = Round 1 (Selectivity)
MVSAHFILIHTICHGAWLWYKLIPLLQSAGHNATAIDLVASGIDPRQLEQIGTWEQYSEPLFTLIESIPEGKKVILVGESGGGINIALAAEKYPEKVSALVFHNALMPDIDHSPAFVYKKFSEVFTDWKDSIFSNYTYGNDTVTLVELGDRTLAENIFSNSPIEDVELAKHLVRKGSFFEQDLDTLPNFTSEGYGSIRRVYVYGEEDQIFSRDFQLWQINNYKPDKVYCVPSADHKIQISKVNELAQILQEVANSASDLLAVA

SEQ ID NO: 451 - DNA, 789 bp, synthetic construct
  misc_feature 1..789: note = Round 1 (Selectivity)
  source 1..789: mol_type = other DNA
atggttagtgcgcattttattctgatccacaccatttgccatggcgcctggctctggtataaactgatcccgttattacagtctgcaggtcataacgctacggcgattgatcttgtggctagcgggatcgaccctcgccaactggaacagattggcacatgggagcagtactcagaaccattgttcaccctgatcgaatcgattccggaaggtaagaaagtcattctggtaggagaatccggtggcggcatcaatattgcactggccgcggagaaatatccggagaaagtgagcgccctcgtctttcacaacgcacttatgcccgatatcgatcacagtccagcgttcgtgtacaagaaatttagcacggttttcactgactggaaagattcgatcttcagcaattatacctacggtaacgacacggttaccgcggtggaattgggagatcgtactctggccgagaacatcttctccaattctccgattgaagatgtagaactggcgaaacatctggtccgcaaaggctccttctttgagcaagacttggataccctgccgaactttacgtcggaagggtatggttcaattcgtcgtgtgtatgtttacggcgaagaagaccagatctttagccgcgattttcagttatggcaaattaataattataagcctgataaagtgtactgtgtaccgagtgctgaccacaagattcagatcagcaaagtcaacgagctggcccagattctccaagaagttgcaaactctgcgagtgatcttcttgcagtggct

SEQ ID NO: 452 - protein, 263 aa, synthetic construct
  REGION 1..263: note = Round 1 (Selectivity)
MVSAHFILIHTICHGAWLWYKLIPLLQSAGHNATAIDLVASGIDPRQLEQIGTWEQYSEPLFTLIESIPEGKKVILVGESGGGINIALAAEKYPEKVSALVFHNALMPDIDHSPAFVYKKFSTVFTDWKDSIFSNYTYGNDTVTAVELGDRTLAENIFSNSPIEDVELAKHLVRKGSFFEQDLDTLPNFTSEGYGSIRRVYVYGEEDQIFSRDFQLWQINNYKPDKVYCVPSADHKIQISKVNELAQILQEVANSASDLLAVA

SEQ ID NO: 453 - DNA, 789 bp, synthetic construct
  misc_feature 1..789: note = Round 1 (Selectivity)
  source 1..789: mol_type = other DNA
atggttagtgcgcattttattctgatccacaccatttgccatggcgcctggctctggtataaactgatcccgttattacagtctgcaggtcataacgctacggcgattgatcttgtggctagcgggatcgaccctcgccaactggaacagattggcacatgggagcagtactcagaaccattgttcaccctgatcgaatcgattccggaaggtaagaaagtcattctggtaggagaatccggtggcggcatcaatattgcactggccgcggagaaatatccggagaaagtgagcgccctcgtctttcacaacgcacttatgcccgatatcgatcacagtccagcgttcgtgtacaagaaatttagcgaagttttcactgcgtggaaagattcgatcttcagcaattatacctacggtaacgacacggttaccgcggtggaattgggagatcgtactctggccgagaacatcttctccaattctccgattgaagatgtagaactggcgaaacatctggtccgcaaaggctccttctttgagcaagacttggataccctgccgaactttacgtcggaagggtatggttcaattcgtcgtgtgtatgtttacggcgaagaagaccagatctttagccgcgattttcagttatggcaaattaataattataagcctgataaagtgtactgtgtaccgagtgctgaccacaagattcagatcagcaaagtcaacgagctggcccagattctccaagaagttgcaaactctgcgagtgatcttcttgcagtggct

SEQ ID NO: 454 - protein, 263 aa, synthetic construct
  REGION 1..263: note = Round 1 (Selectivity)
MVSAHFILIHTICHGAWLWYKLIPLLQSAGHNATAIDLVASGIDPRQLEQIGTWEQYSEPLFTLIESIPEGKKVILVGESGGGINIALAAEKYPEKVSALVFHNALMPDIDHSPAFVYKKFSEVFTAWKDSIFSNYTYGNDTVTAVELGDRTLAENIFSNSPIEDVELAKHLVRKGSFFEQDLDTLPNFTSEGYGSIRRVYVYGEEDQIFSRDFQLWQINNYKPDKVYCVPSADHKIQISKVNELAQILQEVANSASDLLAVA

SEQ ID NO: 455 - DNA, 789 bp, synthetic construct
  misc_feature 1..789: note = Round 1 (Selectivity)
  source 1..789: mol_type = other DNA
atggttagtgcgcattttattctgatccacaccatttgccatggcgcctggctctggtataaactgatcccgttattacagtctgcaggtcataacgctacggcgattgatcttgtggctagcgggatcgaccctcgccaactggaacagattggcacatgggagcagtactcagaaccattgttcaccctgatcgaatcgattccggaaggtaagaaagtcattctggtaggagaatccggtggcggcatcaatattgcactggccgcggagaaatatccggagaaagtgagcgccctcgtctttcactcggcacttatgcccgatatcgatcacagtccagcgttcgtgtacaagaaatttagcgaagttttcactgactggaaagattcgatcttcagcaattatacctacggtaacgacacggttaccgcggtggaattgggagatcgtactctggccgagaacatcttctccaattctccgattgaagatgtagaactggcgaaacatctggtccgcaaaggctccttctttgagcaagacttggataccctgccgaactttacgtcggaagggtatggttcaattcgtcgtgtgtatgtttacggcgaagaagaccagatctttagccgcgattttcagttatggcaaattaataattataagcctgataaagtgtactgtgtaccgagtgctgaccacaagattcagatcagcaaagtcaacgagctggcccagattctccaagaagttgcaaactctgcgagtgatcttcttgcagtggct

SEQ ID NO: 456 - protein, 263 aa, synthetic construct
  REGION 1..263: note = Round 1 (Selectivity)
MVSAHFILIHTICHGAWLWYKLIPLLQSAGHNATAIDLVASGIDPRQLEQIGTWEQYSEPLFTLIESIPEGKKVILVGESGGGINIALAAEKYPEKVSALVFHSALMPDIDHSPAFVYKKFSEVFTDWKDSIFSNYTYGNDTVTAVELGDRTLAENIFSNSPIEDVELAKHLVRKGSFFEQDLDTLPNFTSEGYGSIRRVYVYGEEDQIFSRDFQLWQINNYKPDKVYCVPSADHKIQISKVNELAQILQEVANSASDLLAVA

SEQ ID NO: 457 - DNA, 789 bp, synthetic construct
  misc_feature 1..789: note = Round 1 (Selectivity)
  source 1..789: mol_type = other DNA
atggttagtgcgcattttattctgatccacaccatttgccatggcgcctggctctggtataaactgatcccgttattacagtctgcaggtcataacgctacggcgattgatcttgtggctagcgggatcgaccctcgccaactggaacagattggcacatgggagcagtactcagaaccattgttcaccctgatcgaatcgattccggaaggtaagaaagtcattctggtaggagaatccggtggcggcatcaatattgcactggccgcggagaaatatccggagaaagtgagcgccctcgtctttcacaacgcacttatgcccgatatcgatcacagtccagcgttcgtgtacaagaaatttagcgaagttttcactgactggaaagattcgatcttcagcaattatacctacggtaacgacacggttaccgcggtggaattgggagatcgtactctggccgagaacgtgttctccaattctccgattgaagatgtagaactggcgaaacatctggtccgcaaaggctccttctttgagcaagacttggataccctgccgaactttacgtcggaagggtatggttcaattcgtcgtgtgtatgtttacggcgaagaagaccagatctttagccgcgattttcagttatggcaaattaataattataagcctgataaagtgtactgtgtaccgagtgctgaccacaagattcagatcagcaaagtcaacgagctggcccagattctccaagaagttgcaaactctgcgagtgatcttcttgcagtggct

SEQ ID NO: 458 - protein, 263 aa, synthetic construct
  REGION 1..263: note = Round 1 (Selectivity)
MVSAHFILIHTICHGAWLWYKLIPLLQSAGHNATAIDLVASGIDPRQLEQIGTWEQYSEPLFTLIESIPEGKKVILVGESGGGINIALAAEKYPEKVSALVFHNALMPDIDHSPAFVYKKFSEVFTDWKDSIFSNYTYGNDTVTAVELGDRTLAENVFSNSPIEDVELAKHLVRKGSFFEQDLDTLPNFTSEGYGSIRRVYVYGEEDQIFSRDFQLWQINNYKPDKVYCVPSADHKIQISKVNELAQILQEVANSASDLLAVA

SEQ ID NO: 459 - DNA, 789 bp, synthetic construct
  misc_feature 1..789: note = Round 1 (Selectivity)
  source 1..789: mol_type = other DNA
atggttagtgcgcattttattctgatccacaccatttgccatggcgcctggctctggtataaactgatcccgttattacagtctgcaggtcataacgctacggcgattgatcttgtgtctagcgggatcgaccctcgccaactggaacagattggcacatgggagcagtactcagaaccattgttcaccctgatcgaatcgattccggaaggtaagaaagtcattctggtaggagaatccggtggcggcatcaatattgcactggccgcggagaaatatccggagaaagtgagcgccctcgtctttcacaacgcacttatgcccgatatcgatcacagtccagcgttcgtgtacaagaaatttagcgaagttttcactgactggaaagattcgatcttcagcaattatacctacggtaacgacacggttaccgcggtggaattgggagatcgtactctggccgagaacatcttctccaattctccgattgaagatgtagaactggcgaaacatctggtccgcaaaggctccttctttgagcaagacttggataccctgccgaactttacgtcggaagggtatggttcaattcgtcgtgtgtatgtttacggcgaagaagaccagatctttagccgcgattttcagttatggcaaattaataattataagcctgataaagtgtactgtgtaccgagtgctgaccacaagattcagatcagcaaagtcaacgagctggcccagattctccaagaagttgcaaactctgcgagtgatcttcttgcagtggct

SEQ ID NO: 460 - protein, 263 aa, synthetic construct
  REGION 1..263: note = Round 1 (Selectivity)
MVSAHFILIHTICHGAWLWYKLIPLLQSAGHNATAIDLVSSGIDPRQLEQIGTWEQYSEPLFTLIESIPEGKKVILVGESGGGINIALAAEKYPEKVSALVFHNALMPDIDHSPAFVYKKFSEVFTDWKDSIFSNYTYGNDTVTAVELGDRTLAENIFSNSPIEDVELAKHLVRKGSFFEQDLDTLPNFTSEGYGSIRRVYVYGEEDQIFSRDFQLWQINNYKPDKVYCVPSADHKIQISKVNELAQILQEVANSASDLLAVA

SEQ ID NO: 461 - DNA, 789 bp, synthetic construct
  misc_feature 1..789: note = Round 1 (Selectivity)
  source 1..789: mol_type = other DNA
atggttagtgcgcattttattctgatccacaccatttgccatggcgcctggctctggtataaactgatcccgttattacagtctgcaggtcataacgctacggcgattgatcttgtggctagcgggatcgaccctcgccaactggaacagattggcacatgggagcagtactcagaaccattgttcaccctgatcgaatcgattccggaaggtaagaaagtcattctggtaggagaatccggtggcggcatcaatattgcactggccgcggagaaatatccggagaaagtgagcgccctcgtctttcacaacgcacttatgcccgatatcgatcacagtccagcgttcgtgtacaagaaatttagcgaagttttcactgactggaaagattcgatcttccgtaattatacctacggtaacgacacggttaccgcggtggaattgggagatcgtactctggccgagaacatcttctccaattctccgattgaagatgtagaactggcgaaacatctggtccgcaaaggctccttctttgagcaagacttggataccctgccgaactttacgtcggaagggtatggttcaattcgtcgtgtgtatgtttacggcgaagaagaccagatctttagccgcgattttcagttatggcaaattaataattataagcctgataaagtgtactgtgtaccgagtgctgaccacaagattcagatcagcaaagtcaacgagctggcccagattctccaagaagttgcaaactctgcgagtgatcttcttgcagtggct

SEQ ID NO: 462 - protein, 263 aa, synthetic construct
  REGION 1..263: note = Round 1 (Selectivity)
MVSAHFILIHTICHGAWLWYKLIPLLQSAGHNATAIDLVASGIDPRQLEQIGTWEQYSEPLFTLIESIPEGKKVILVGESGGGINIALAAEKYPEKVSALVFHNALMPDIDHSPAFVYKKFSEVFTDWKDSIFRNYTYGNDTVTAVELGDRTLAENIFSNSPIEDVELAKHLVRKGSFFEQDLDTLPNFTSEGYGSIRRVYVYGEEDQIFSRDFQLWQINNYKPDKVYCVPSADHKIQISKVNELAQILQEVANSASDLLAVA

SEQ ID NO: 463 - DNA, 789 bp, synthetic construct
  misc_feature 1..789: note = Round 2 (Selectivity)
  source 1..789: mol_type = other DNA
atggttagtgcgcattttattctgatccacagtatttgccatggcgcctggctgtggtataaactgatcccgttattacagtctgcaggtcataacgttacggcgattgatctttgggctagcgggatcgaccctcgccaactggaacagattggcacatgggagcagtactcagaaccattgttcaccctgatcgaatcgattccggaaggtaagaaagtcattctggtaggagaatccggtggcggcatcaatattgcactggccgcggagaaatatccggagaaagtgagcgccctcgtctttcacaacgcacttatgcccgatatcgatcacagtccagcgttcgtgctgaagaaatatagcgaagttttcactgactggaaagattcgatcttcagcaattatacctacggtaacgacacggttaccgcggtggaattgggagatcgtactctggccgagaacatcttctccaattctccgattgaagatgtagaactggcgaaacatctggtccgccctggctccttctttgagcaagacttggataccctgccgaactttacgtcggaagggtatggttcaattcgtcgtgtgtatgtttacggcgaagaagaccagatctttagccgcgattttcagttatggcaaattaataattataagcctgataaagtgtactgtgtcccgagtgctgaccacaagattcagatcagcaaagtcaacgagctggcccagattctccaagaagttgcaaactctgcgagtgatcttcttgcagtggct

SEQ ID NO: 464 - protein, 263 aa, synthetic construct
  REGION 1..263: note = Round 2 (Selectivity)
MVSAHFILIHSICHGAWLWYKLIPLLQSAGHNVTAIDLWASGIDPRQLEQIGTWEQYSEPLFTLIESIPEGKKVILVGESGGGINIALAAEKYPEKVSALVFHNALMPDIDHSPAFVLKKYSEVFTDWKDSIFSNYTYGNDTVTAVELGDRTLAENIFSNSPIEDVELAKHLVRPGSFFEQDLDTLPNFTSEGYGSIRRVYVYGEEDQIFSRDFQLWQINNYKPDKVYCVPSADHKIQISKVNELAQILQEVANSASDLLAVA

SEQ ID NO: 465 - DNA, 789 bp, synthetic construct
  misc_feature 1..789: note = Round 2 (Activity)
  source 1..789: mol_type = other DNA
atggttagtgcgcattttattctgatccacagtatttgccatggcgcctggctgtggtataaactgatcccgttattacagtctgcaggtcataacgttacggcgattgatctttgggctagcgggatcgaccctcgccaactggaacagattggcacatgggagcagtactcagaaccattgttcaccctgatcgaatcgattccggaaggtaagaaagtcattctggtaggagaatccggtggcggcatcaatattgcactggccgcggagaaatatccggagaaagtgagcgccctcgtctttcacaacgcacttatgcccgatatcgatcacagtccagcgttcgtgtacaagaaatttagcgaagttttcactgactggaaagattcgatcttcagcaattatacctacggtaacgacacggttaccgcggtggaattgggagatcgtactctggccgagaacatcttctccaattctccgattgaagatgtagaactggcgaaacatctggtccgcaaaggctccttctttgagcaagacttggataccctgccgaactttacgtcggaagggtatggttcagtccgtcgtgtgtatgtttacggcgaagaagaccagatcatgagccgcgattttcagttatggcaaattaataattataagcctgataaagtgtactgtgtaccgagtgctgaccacaagattcagatcagcaaagtcaacgagctggcccagattctccaagaagttgcaaactctgcgagtgatcttcttgcagtggct

SEQ ID NO: 466 - protein, 263 aa, synthetic construct
  REGION 1..263: note = Round 2 (Activity)
MVSAHFILIHSICHGAWLWYKLIPLLQSAGHNVTAIDLWASGIDPRQLEQIGTWEQYSEPLFTLIESIPEGKKVILVGESGGGINIALAAEKYPEKVSALVFHNALMPDIDHSPAFVYKKFSEVFTDWKDSIFSNYTYGNDTVTAVELGDRTLAENIFSNSPIEDVELAKHLVRKGSFFEQDLDTLPNFTSEGYGSVRRVYVYGEEDQIMSRDFQLWQINNYKPDKVYCVPSADHKIQISKVNELAQILQEVANSASDLLAVA

SEQ ID NO: 467 - DNA, 789 bp, synthetic construct
  misc_feature 1..789: note = Round 2 (Activity)
  source 1..789: mol_type = other DNA
atggttagtgcgcattttattctgatccacagtatttgccatggcgcctggctctggtataaactgatcccgttattacagtctgcaggtcataacgctacggcgattgatcttgtggctagcgggatcgaccctcgccaactggaacagattggcacatgggagcagtactcagaaccattgttcaccctgatcgaatcgattccggaaggtaagaaagtcattctggtaggagaatccggtggcggcatcaatattgcactggccgcggagaaatatccggagaaagtgagcgccctcgtctttcacaacgcacttatgcccgatatcgatcacagtccagcgttcgtgtacaagaaatttagcgaagttttcactgactggaaagattcgatcttcagcaattatacctacggtaacgacacggttaccgcggtggaattgggagatcgtactctggccgagaacatcttctccaattctccgattgaagatgtagaactggcgaaacatctggtccgcaaaggctccttctttgagcaagacttggataccctgccgaactttacgtcggaagggtatggttcaattcgtcgtgtgtatgtttacggcgaagaagaccagatctttagccgcgattttcagttatggcaaattaataattataagcctgataaagtgtactgtgtaccgagtgctgaccacaagattatgatcagcaaagtcaacgagctggcccagattctccaagaagttgcaaactctgcgagtgatcttcttgcagtggct

SEQ ID NO: 468 - protein, 263 aa, synthetic construct
  REGION 1..263: note = Round 2 (Activity)
MVSAHFILIHSICHGAWLWYKLIPLLQSAGHNATAIDLVASGIDPRQLEQIGTWEQYSEPLFTLIESIPEGKKVILVGESGGGINIALAAEKYPEKVSALVFHNALMPDIDHSPAFVYKKFSEVFTDWKDSIFSNYTYGNDTVTAVELGDRTLAENIFSNSPIEDVELAKHLVRKGSFFEQDLDTLPNFTSEGYGSIRRVYVYGEEDQIFSRDFQLWQINNYKPDKVYCVPSADHKIMISKVNELAQILQEVANSASDLLAVA

SEQ ID NO: 469 - DNA, 789 bp, synthetic construct
  misc_feature 1..789: note = Round 2 (Activity)
  source 1..789: mol_type = other DNA
atggttagtgcgcattttattctgatccacagtatttgccatggcgcctggctctggtataaactgatcccgttattacagtctgcaggtcataacgctacggcgattgatcttgtggctagcgggatcgaccctcgccaactggaacagattggcacatgggagcagtactcagaaccattgttcaccctgatcgaatcgattccggaaggtaagaaagtcattctggtaggagaatccttcggcggcatcaatattgcactggccgcggagaaatatccggagaaagtgagcgccctcgtctttcacaacgcacttatgcccgatatcgatcacagtccagcgttcgtgtacaagaaatttagcgaagttttcactgactggaaagattcgatcttcagcaattatacctacggtaacgacacggttaccgcggtggaattgggagatcgtactctggccgagaacatcttctccaattctccgattgaagatgtagaactggcgaaacatctggtccgcaaaggctccttctttgagcaagacttggataccctgccgaactttacgtcggaagggtatggttcaattcgtcgtgtgtatgtttacggcgaagaagaccagatctttagccgcgattttcagttatggcaaattaataattataagcctgataaagtgtactgtgtaccgagtgctgaccacaagattcagatcagcaaagtcaacgagctggcccagattctccaagaagttgcaaactctgcgagtgatcttcttgcagtggct

SEQ ID NO: 470 - protein, 263 aa, synthetic construct
  REGION 1..263: note = Round 2 (Activity)
MVSAHFILIHSICHGAWLWYKLIPLLQSAGHNATAIDLVASGIDPRQLEQIGTWEQYSEPLFTLIESIPEGKKVILVGESFGGINIALAAEKYPEKVSALVFHNALMPDIDHSPAFVYKKFSEVFTDWKDSIFSNYTYGNDTVTAVELGDRTLAENIFSNSPIEDVELAKHLVRKGSFFEQDLDTLPNFTSEGYGSIRRVYVYGEEDQIFSRDFQLWQINNYKPDKVYCVPSADHKIQISKVNELAQILQEVANSASDLLAVA

SEQ ID NO: 471 - DNA, 789 bp, synthetic construct
  misc_feature 1..789: note = Round 2 (Activity)
  source 1..789: mol_type = other DNA
atggttagtgcgcattttattctgatccacagtatttgccatggcgcctggctgtggtataaactgatcccgttattacagtctgcaggtcataacgttacggcgattgatctttgggctagcgggatcaaccctcgccaactggaacagattggcacatgggagcagtactcagaaccattgttcaccctgatcgaatcgattccggaaggtaagaaagtcattctggtaggagaatccggtggcggcatcaatattgcactggccgcggagaaatatccggagaaagtgagcgccctcgtctttcacaacgcacttatgcccgatatcgatcacagtccagcgttcgtgtacaagaaatttagcgaagttttcactgactggaaagattcgatcttcagcaattatacctacggtaacgacacggttaccgcggtggaattgggagatcgtactctggccgagaacatcttctccaattctccgattgaagatgtagaactggcgaaacatctggtccgcaagggctccttctttgagcaagacttggataccctgccgaactttacgtcggaagggtatggttcagtccgtcgtgtgtatgtttacggcgaagaagaccagatctttagccgcgattttcagttatggcaaattaataattataagcctgataaagtgtactgtgtaccgagtgctgaccacaagattcagatcagcaaagtcaacgagctggcccagattctccaagaagttgcaaactctgcgagtgatcttcttgcagtggct

SEQ ID NO: 472 - protein, 263 aa, synthetic construct
  REGION 1..263: note = Round 2 (Activity)
MVSAHFILIHSICHGAWLWYKLIPLLQSAGHNVTAIDLWASGINPRQLEQIGTWEQYSEPLFTLIESIPEGKKVILVGESGGGINIALAAEKYPEKVSALVFHNALMPDIDHSPAFVYKKFSEVFTDWKDSIFSNYTYGNDTVTAVELGDRTLAENIFSNSPIEDVELAKHLVRKGSFFEQDLDTLPNFTSEGYGSVRRVYVYGEEDQIFSRDFQLWQINNYKPDKVYCVPSADHKIQISKVNELAQILQEVANSASDLLAVA

SEQ ID NO: 473 - DNA, 789 bp, synthetic construct
  misc_feature 1..789: note = Round 2 (Activity)
  source 1..789: mol_type = other DNA
atggttagtgcgcattttattctgatccacagtatttgccatggcgcctggctctggtataaactgatcccgttattacagtctgcaggtcataacgctacggcgattgatctttgggctagcgggatcgaccctcgccaactggaacagattggcacatgggagcagtactcagaaccattgttcaccctgatcgaatcgattccggaaggtaagaaagtcattctggtaggagaatccggtggcggcatcaatattgcactggccgcggagaaatatccggagaaagtgagcgccctcgtctttagtaacgcacttatgcccgatatcgatcacagtccagcgttcgtgtacaagaaatttagcgaagtttttactgactggaaagattcgatcttcagcaattatacctacggtaacgacacggttaccgcggtggaattgggagatcgtactctggccgagaacatcttctccaattctccgattgaagatgtagaactggcgaaacatctggtccgcaaaggctccttctttgagcaagacttggataccctgccgaactttacgtcggaagggtatggttcaattcgtcgtgtgtatgtttacggcgaagaagaccagatctttagccgcgattttcagttatggcaaattaataattataagcctgataaagtgtactgtgtaccgagtgctgaccacaagattcagatcagcaaagtcaacgagctggcccagattctccaagaagttgcaaactctgcgagtgatcttcttgcagtggct

SEQ ID NO: 474 - protein, 263 aa, synthetic construct
  REGION 1..263: note = Round 2 (Activity)
MVSAHFILIHSICHGAWLWYKLIPLLQSAGHNATAIDLWASGIDPRQLEQIGTWEQYSEPLFTLIESIPEGKKVILVGESGGGINIALAAEKYPEKVSALVFSNALMPDIDHSPAFVYKKFSEVFTDWKDSIFSNYTYGNDTVTAVELGDRTLAENIFSNSPIEDVELAKHLVRKGSFFEQDLDTLPNFTSEGYGSIRRVYVYGEEDQIFSRDFQLWQINNYKPDKVYCVPSADHKIQISKVNELAQILQEVANSASDLLAVA

SEQ ID NO: 475 - DNA, 789 bp, synthetic construct
  misc_feature 1..789: note = Round 2 (Activity)
  source 1..789: mol_type = other DNA
atggttagtgcgcattttattctgatccacagtatttgccatggcgcctggctctggtataaactgatcccgttattacagtctgcaggtcataacgctacggcgattgatcttgtggctagcgggatcgaccctcgccaactggaacagattggcacatgggagcagtactcagaaccattgttcaccctgatcgaatcgattccggaaggtaagaaagtcattctggtaggagaatccggtggcggcatcaatattgcactggccgcggagaaatatccggagaaagtgagcgccctcgtctttgtgaacgcacttatgcccgatatcgatcacagtccagcgttcgtgtacaagaaatttagcgaagttttcactgactggaaagattcgatcttcagcaattatacctacggtaacgacacggttaccgcggtggaattgggagatcgtactctggccgagaacatcttctccaattctccgattgaagatgtagaactggcgaaacatctggtccgcaaaggctccttctttgagcaagacttggataccctgccgaactttacgtcggaagggtatggttcaattcgtcgtgtgtatgtttacggcgaagaagaccagatctttagccgcgattttcagttatggcaaattaataattataagcctgataaagtgtactgtgtaccgagtgctgaccacaagattcagatcagcaaagtcaacgagctggcccagattctccaagaagttgcaaactctgcgagtgatcttcttgcagtggct

SEQ ID NO: 476 - protein, 263 aa, synthetic construct
  REGION 1..263: note = Round 2 (Activity)
MVSAHFILIHSICHGAWLWYKLIPLLQSAGHNATAIDLVASGIDPRQLEQIGTWEQYSEPLFTLIESIPEGKKVILVGESGGGINIALAAEKYPEKVSALVFVNALMPDIDHSPAFVYKKFSEVFTDWKDSIFSNYTYGNDTVTAVELGDRTLAENIFSNSPIEDVELAKHLVRKGSFFEQDLDTLPNFTSEGYGSIRRVYVYGEEDQIFSRDFQLWQINNYKPDKVYCVPSADHKIQISKVNELAQILQEVANSASDLLAVA

SEQ ID NO: 477 - DNA, 789 bp, synthetic construct
  misc_feature 1..789: note = Round 2 (Activity)
  source 1..789: mol_type = other DNA
atggttagtgcgcattttattctgatccacagtatttgccatggcgcctggctctggtataaactgatcccgttattacagtctgcaggtcataacgctacggcgattgatcttgtggctagcgggatcgaccctcgccaactggaacagattggcacatgggagcagtactcagaaccattgttcaccctgatcgaatcgattccggaaggtaagaaagtcattctggtaggagaatccggtggcggcatcaatattgcactggccgcggagaaatatccggagaaagtgagcgccctcgtctttcacaacgcacttatgcccgatatcgatcacagtccagcgttcgtgtacaagaaatttagcgaagttttcactgactggaaagattcgatcttcagcaattatacctacggtaacgacacggttaccgcggtggaattgggagatcgtactctggccgagaacatcttctccaattctccgattgaagatgtagaactggcgaaacatctggtccgcaaaggctccttctttgagcaagacttggataccctgccgaactttacgtcggaagggtatggttcaattcgtcgtgtgtatgtttacggcgaagaagaccagatctttagccgcgattttcagttatggcaaattaataattataagcctgataaagtgtactgtgtaccgggcgctgaccacaagattcagatcagcaaagtcaacgagctggcccagattctccaagaagttgcaaactctgcgagtgatcttcttgcagtggct

SEQ ID NO: 478 - protein, 263 aa, synthetic construct
  REGION 1..263: note = Round 2 (Activity)
MVSAHFILIHSICHGAWLWYKLIPLLQSAGHNATAIDLVASGIDPRQLEQIGTWEQYSEPLFTLIESIPEGKKVILVGESGGGINIALAAEKYPEKVSALVFHNALMPDIDHSPAFVYKKFSEVFTDWKDSIFSNYTYGNDTVTAVELGDRTLAENIFSNSPIEDVELAKHLVRKGSFFEQDLDTLPNFTSEGYGSIRRVYVYGEEDQIFSRDFQLWQINNYKPDKVYCVPGADHKIQISKVNELAQILQEVANSASDLLAVA

SEQ ID NO: 479 - DNA, 789 bp, synthetic construct
  misc_feature 1..789: note = Round 2 (Activity)
  source 1..789: mol_type = other DNA
atggttagtgcgcattttattctgatccacagtatttgccatggcgcctggctctggtataaactgatcccgttattacagtctgcaggtcataacgctacggcgattgatctttgggctagcgggatctaccctcgccaactggaacagattggcacatgggagcagtactcagaaccattgttcaccctgatcgaatcgattccggaaggtaagaaagtcattctggtaggagaatccggtggcggcatcaatattgcactggccgcggagaaatatccggagaaagtgagcgccctcgtctttagtaacgcacttatgcccgatatcgatcacagtccagcgttcgtgtacaagaaatttagcgaagtttttactgactggaaagattcgatcttcagcaattatacctacggtaacgacacggttaccgcggtggaattgggagaccgtactctggccgagaacatcttctccaattctccgattgaagatgtagaactggcgaaacatctggtccgcaaaggctccttctttgagcaagacttggataccctgccgaactttacgtcggaagggtatggttcaattcgtcgtgtgtatgtttacggcgaagaagaccagatttttagccgcgattttcagttatggcaaattaataattataagcctgataaagtgtactgtgtaccgagtgctgaccacaagattcagatcagcaaagtcaacgagctggcccagattctccaagaagttgcaaactctgcgagtgatcttcttgcagtggct

SEQ ID NO: 480 - protein, 263 aa, synthetic construct
  REGION 1..263: note = Round 2 (Activity)
MVSAHFILIHSICHGAWLWYKLIPLLQSAGHNATAIDLWASGIYPRQLEQIGTWEQYSEPLFTLIESIPEGKKVILVGESGGGINIALAAEKYPEKVSALVFSNALMPDIDHSPAFVYKKFSEVFTDWKDSIFSNYTYGNDTVTAVELGDRTLAENIFSNSPIEDVELAKHLVRKGSFFEQDLDTLPNFTSEGYGSIRRVYVYGEEDQIFSRDFQLWQINNYKPDKVYCVPSADHKIQISKVNELAQILQEVANSASDLLAVA

SEQ ID NO: 481 - DNA, 789 bp, synthetic construct
  misc_feature 1..789: note = Round 2 (Selectivity)
  source 1..789: mol_type = other DNA
atggttagtgcgcattttattctgatccacagtatttgccatggcgcctggctgtggtataaactgatcccgttattacagtctgcaggtcataacgttacggcgattgatcttgtggctagcgggatcgaccctcgccaactggaacagattggcacatgggagcagtactcagaaccattgttcaccctgatcgaatcgattccggaaggtaagaaagtcattctggtaggagaatccggtggcggcatcaatattgcactggccgcggagaaatatccggagaaagtgagcgccctcgtctttcacaacgcacttatgcccgatatcgatcacagtccagcgttcgtgctgaagaaatatagcgaagttttcactgactggaaagattcgatcttcagcaattatacctacggtaacgacacggttaccgcggtggaattgggagatcgtactctggccgagaacatcttctccaattctccgattgaagatgtagaactggcgaaacatctggtccgcaaaggctccttctttgagcaagacttggataccctgccgaactttacgtcggaagggtatggttcaattcgtcgtgtgtatgtttacggcgaagaagaccagatctttagccgcgattttcagttatggcaaattaataattataagcctgataaagtgtactgtgtcccgagtgctgaccacaagattcagatcagcaaagtcaacgagctggcccagattctccaagaagttgcaaactctgcgagtgatcttcttgcagtggct

SEQ ID NO: 482 - protein, 263 aa, synthetic construct
  REGION 1..263: note = Round 2 (Selectivity)
MVSAHFILIHSICHGAWLWYKLIPLLQSAGHNVTAIDLVASGIDPRQLEQIGTWEQYSEPLFTLIESIPEGKKVILVGESGGGINIALAAEKYPEKVSALVFHNALMPDIDHSPAFVLKKYSEVFTDWKDSIFSNYTYGNDTVTAVELGDRTLAENIFSNSPIEDVELAKHLVRKGSFFEQDLDTLPNFTSEGYGSIRRVYVYGEEDQIFSRDFQLWQINNYKPDKVYCVPSADHKIQISKVNELAQILQEVANSASDLLAVA

SEQ ID NO: 483 - DNA, 789 bp, synthetic construct
  misc_feature 1..789: note = Round 2 (Selectivity)
  source 1..789: mol_type = other DNA
atggttagtgcgcattttattctgatccacagtatttgccatggcgcctggctgtggtataaactgatcccgttattacagtctgcaggtcataacgttacggcgattgatctttgggctagcgggatcgaccctcgccaactggaacagattggcacatgggagcagtactcagaaccattgttcaccctgatcgaatcgattccggaaggtaagaaagtcattctggtaggagaatccggtggcggcatcaatattgcactggccgcggagaaatatccggagaaagtgagcgccctcgtctttcacaacgcacttatgcccgatatcgatcacagtccagcgttcgtgtataagaaatatagcgaagttttcactgactggaaagattcgatcttcagcaattatacctacggtaacgacacggttaccgcggtggaattgggagatcgtactctggccgagaacatcttctccaattctccgattgaagatgtagaactggcgaaacatctggtccgccctggctccttctttgagcaagacttggataccctgccgaactttacgtcggaagggtatggttcaattcgtcgtgtgtatgtttacggcgaagaagaccagatctttagccgcgattttcagttatggcaaattaataattataagcctgataaagtgtactgtgtaccgagtgctgaccacaagattcagatcagcaaagtcaacgagctggcccagattctccaagaagttgcaaactctgcgagtgatcttcttgcagtggct

SEQ ID NO: 484 - protein, 263 aa, synthetic construct
  REGION 1..263: note = Round 2 (Selectivity)
MVSAHFILIHSICHGAWLWYKLIPLLQSAGHNVTAIDLWASGIDPRQLEQIGTWEQYSEPLFTLIESIPEGKKVILVGESGGGINIALAAEKYPEKVSALVFHNALMPDIDHSPAFVYKKYSEVFTDWKDSIFSNYTYGNDTVTAVELGDRTLAENIFSNSPIEDVELAKHLVRPGSFFEQDLDTLPNFTSEGYGSIRRVYVYGEEDQIFSRDFQLWQINNYKPDKVYCVPSADHKIQISKVNELAQILQEVANSASDLLAVA

SEQ ID NO: 485 - DNA, 789 bp, synthetic construct
  misc_feature 1..789: note = Round 2 (Activity)
  source 1..789: mol_type = other DNA
atggttagtgcgcattttattctgatccacagtatttgccatggcgcctggctctggtataaactgatcccgttattacagtctgcaggtcataacgctacggcgattgatcttgtcgctagcgggatcgaccctcgccaactggaacagattggcacatgggagcagtactcagaaccattgttcaccctgatcgaatcgattccggaaggtaagaaagtcattctggtaggagaatccggtggcggcatcaatattgcactggccgcggagaaatatccggagaaagtgagcgccctcgtctttagtaacgcacttatgcccgatatcgatcacagtccagcgttcgtgtacaagaaatttagcgaagttttcactgactggaaagattcgatcttcagcaattatacctacggtaacgacacggttaccgcggtggaattgggagatcgtactctggccgagaacatcttctccaattctccgattgaagatgtagaactggcgaaacatctggtccgcaaaggctccttctttgagcaagacttggataccctgccgaactttacgtcggaagggtatggttcaattcgtcgtgtgtatgtttacggcgaagaagaccagatttttagccgcgattttcagttatggcaaattaataattataagcctgataaagtgtactgtgtaccgagtgctgaccacaagattcagatcagcaaagtcaacgagctggcccagattctccaagaagttgcaaactctgcgagtgatcttcttgcagtggct

SEQ ID NO: 486 - protein, 263 aa, synthetic construct
  REGION 1..263: note = Round 2 (Activity)
MVSAHFILIHSICHGAWLWYKLIPLLQSAGHNATAIDLVASGIDPRQLEQIGTWEQYSEPLFTLIESIPEGKKVILVGESGGGINIALAAEKYPEKVSALVFSNALMPDIDHSPAFVYKKFSEVFTDWKDSIFSNYTYGNDTVTAVELGDRTLAENIFSNSPIEDVELAKHLVRKGSFFEQDLDTLPNFTSEGYGSIRRVYVYGEEDQIFSRDFQLWQINNYKPDKVYCVPSADHKIQISKVNELAQILQEVANSASDLLAVA

SEQ ID NO: 487 - DNA, 789 bp, synthetic construct
  misc_feature 1..789: note = Round 2 (Selectivity)
  source 1..789: mol_type = other DNA
atggttagtgcgcattttattctgatccacagtatttgccatggcgcctggctgtggtataaactgatcccgttattacagtctgcaggtcataacgttacggcgattgatctttgggctagcgggatcaaccctcgccaactggaacagattggcacatgggagcagtactcagaaccattgttcaccctgatcgaatcgattccggaaggtaagaaagtcattctggtaggagaatccggtggcggcatcaatattgcactggccgcggagaaatatccggagaaagtgagcgccctcgtctttcacaacgcacttatgcccgatatcgatcacagtccagcgttcgtgctgaagaaatatagcgaagttttcactgactggaaagattcgatcttcagcaattatacctacggtaacgacacggttaccgcggtggaattgggagatcgtactctggccgagaacatcttctccaattctccgattgaagatgtagaactggcgaaacatctggtccgcaagggctccttctttgagcaagacttggataccctgccgaactttacgtcggaagggtatggttcaattcgtcgtgtgtatgtttacggcgaagaagaccagatctttagccgcgattttcagttatggcaaattaataattataagcctgataaagtgtactgtgtaccgagtgctgaccacaagattcagatcagcaaagtcaacgagctggcccagattctccaagaagttgcaaactctgcgagtgatcttcttgcagtggct

SEQ ID NO: 488 - protein, 263 aa, synthetic construct
  REGION 1..263: note = Round 2 (Selectivity)
MVSAHFILIHSICHGAWLWYKLIPLLQSAGHNVTAIDLWASGINPRQLEQIGTWEQYSEPLFTLIESIPEGKKVILVGESGGGINIALAAEKYPEKVSALVFHNALMPDIDHSPAFVLKKYSEVFTDWKDSIFSNYTYGNDTVTAVELGDRTLAENIFSNSPIEDVELAKHLVRKGSFFEQDLDTLPNFTSEGYGSIRRVYVYGEEDQIFSRDFQLWQINNYKPDKVYCVPSADHKIQISKVNELAQILQEVANSASDLLAVA

SEQ ID NO: 489 - DNA, 789 bp, synthetic construct
  misc_feature 1..789: note = Round 2 (Activity)
  source 1..789: mol_type = other DNA
atggttagtgcgcattttattctgatccacagtatttgccatggcgcctggctctggtataaactgatcccgttattacagtctgcaggtcataacgctacggcgattgatcttgtcgctagcgggatcaaccctcgccaactggaacagattggcacatgggagcagtactcagaaccattgttcaccctgatcgaatcgattccggaaggtaagaaagtcattctggtaggagaatccggtggcggcatcaatattgcactggccgcggagaaatatccggagaaagtgagcgccctcgtctttagtaacgcacttatgcccgatatcgatcacagtccagcgttcgtgtacaagaaatttagcgaagttttcactgactggaaagattcgatcttcagcaattatacctacggtaacgacacggttaccgcggtggaattgggagaccgtactctggccgagaacatcttctccaattctccgattgaagatgtagaactggcgaaacatctggtccgcaaaggctccttctttgagcaagacttggataccctgccgaactttacgtcggaagggtatggttcaattcgtcgtgtgtatgtttacggcgaagaagaccagatttttagccgcgattttcagttatggcaaattaataattataagcctgataaagtgtactgtgtaccgagtgctgaccacaagattcagatcagcaaagtcaacgagctggcccagattctccaagaagttgcaaactctgcgagtgatcttcttgcagtggct

SEQ ID NO: 490 - protein, 263 aa, synthetic construct
  REGION 1..263: note = Round 2 (Activity)
MVSAHFILIHSICHGAWLWYKLIPLLQSAGHNATAIDLVASGINPRQLEQIGTWEQYSEPLFTLIESIPEGKKVILVGESGGGINIALAAEKYPEKVSALVFSNALMPDIDHSPAFVYKKFSEVFTDWKDSIFSNYTYGNDTVTAVELGDRTLAENIFSNSPIEDVELAKHLVRKGSFFEQDLDTLPNFTSEGYGSIRRVYVYGEEDQIFSRDFQLWQINNYKPDKVYCVPSADHKIQISKVNELAQILQEVANSASDLLAVA

SEQ ID NO: 491 - DNA, 789 bp, synthetic construct
  misc_feature 1..789: note = Round 2 (Activity)
  source 1..789: mol_type = other DNA
atggttagtgcgcattttattctgatccacagtatttgccatggcgcctggctctggtataaactgatcccgttattacagtctgcaggtcataacgctacggcgattgatcttgtcgctagcgggatcgaccctcgccaactggaacagattggcacatgggagcagtactcagaaccattgttcaccctgatcgaatcgattccggaaggtaagaaagtcattctggtaggagaatccggtggcggcatcaatattgcactggccgcggagaaatatccggagaaagtgagcgccctcgtctttagtaacgcacttatgcccgatatcgatcacagtccagcgttcgtgtacaagaaatttagcgaagttttcactgactggaaagattcgatcttcagcaattatacctacggtaacgacacggttaccgcggtggaattgggaccacgtactctggccgagaacatcttctccaattctccgattgaagatgtagaactggcgaaacatctggtccgcaaaggctccttctttgagcaagacttggataccctgccgaactttacgtcggaagggtatggttcaattcgtcgtgtgtatgtttacggcgaagaagaccagatctttagccgcgattttcagttatggcaaattaataattataagcctgataaagtgtactgtgtaccgagtgctgaccacaagattcagatcagcaaagtcaacgagctggcccagattctccaagaagttgcaaactctgcgagtgatcttcttgcagtggct

SEQ ID NO: 492 - protein, 263 aa, synthetic construct
  REGION 1..263: note = Round 2 (Activity)
MVSAHFILIHSICHGAWLWYKLIPLLQSAGHNATAIDLVASGIDPRQLEQIGTWEQYSEPLFTLIESIPEGKKVILVGESGGGINIALAAEKYPEKVSALVFSNALMPDIDHSPAFVYKKFSEVFTDWKDSIFSNYTYGNDTVTAVELGPRTLAENIFSNSPIEDVELAKHLVRKGSFFEQDLDTLPNFTSEGYGSIRRVYVYGEEDQIFSRDFQLWQINNYKPDKVYCVPSADHKIQISKVNELAQILQEVANSASDLLAVA

SEQ ID NO: 493 - DNA, 789 bp, synthetic construct
  misc_feature 1..789: note = Round 2 (Activity)
  source 1..789: mol_type = other DNA
atggttagtgcgcattttattctgatccacagtatttgccatggcgcctggctgtggtataaactgatcccgttattacagtctgcaggtcataacgctacggcgattgatctttgggctagcgggatcaaccctcgccaactggaacagattggcacatgggagcagtactcagaaccattgttcaccctgatcgaatcgattccggaaggtaagaaagtcattctggtaggagaatccggtggcggcatcaatattgcactggccgcggagaaatatccggagaaagtgagcgccctcgtctttcacaacgcacttatgcccgatatcgatcacagtccagcgttcgtgtacaagaaatttagcgaagttttcactgactggaaagattcgatcttcagcaattatacctacggtaacgacacggttaccgcggtggaattgggagatcgtactctggccgagaacatcttctccaattctccgattgaagatgtagaactggcgaaacatctggtccgccctggctccttctttgagcaagacttggataccctgccgaactttacgtcggaagggtatggttcagtccgtcgtgtgtatgtttacggcgaagaagaccagatctttagccgcgattttcagttatggcaaattaataattataagcctgataaagtgtactgtatcccgagtgctgaccacaagattcagatcagcaaagtcaacgagctggcccagattctccaagaagttgcaaactctgcgagtgatcttcttgcagtggct

SEQ ID NO: 494 - protein, 263 aa, synthetic construct
  REGION 1..263: note = Round 2 (Activity)
MVSAHFILIHSICHGAWLWYKLIPLLQSAGHNATAIDLWASGINPRQLEQIGTWEQYSEPLFTLIESIPEGKKVILVGESGGGINIALAAEKYPEKVSALVFHNALMPDIDHSPAFVYKKFSEVFTDWKDSIFSNYTYGNDTVTAVELGDRTLAENIFSNSPIEDVELAKHLVRPGSFFEQDLDTLPNFTSEGYGSVRRVYVYGEEDQIFSRDFQLWQINNYKPDKVYCIPSADHKIQISKVNELAQILQEVANSASDLLAVA

SEQ ID NO: 495 - DNA, 789 bp, synthetic construct
  misc_feature 1..789: note = Round 3 (Selectivity)
  source 1..789: mol_type = other DNA
atggttagtgcgcattttattctgatccacagtatttgccatggcgcctggctgtggtataaactgatcccgttattacagtctgcaggtcataacgttacggcgattgatctttgggctagcgggatcaaccctcgccaactggaacagattggcacatgggagcagtactcagaaccattgttcaccctgatcgaatcgattccggaaggtaagaaagtcattctggtaggagaatccggtggcggcatcaatattgcactggccgcggagaaatatccggagaaagtgagcgccctcgtctttcacaacgcacttatgcccgatatcgatcacagtccagcgttcgtgtataagaaatatagcgaagttttcactgactggaaagattcgatcttcagcaattatacctacggtaacgacacggttaccgcggtggaattgggagatcgtactctggccgagaacatcttctccaattctccgattgaagatgtagaactggcgaaacatctggtccgcaaaggctccttctttgagcaagacttggataccctgccgaactttacgtcggaagggtatggttcaattcgtcgtgtgtatgtttacggcgaagaagaccagatctttagccgcgattttcagttatggcaaattaataattataagcctgataaagtgtactgtgtaccgagtgctgaccacaagattcagatcagcaaagtcaacgagctggcccagattctccaagaagttgcaaactctgcgagtgatcttcttgcagtggct

SEQ ID NO: 496 - protein, 263 aa, synthetic construct
  REGION 1..263: note = Round 3 (Selectivity)
MVSAHFILIHSICHGAWLWYKLIPLLQSAGHNVTAIDLWASGINPRQLEQIGTWEQYSEPLFTLIESIPEGKKVILVGESGGGINIALAAEKYPEKVSALVFHNALMPDIDHSPAFVYKKYSEVFTDWKDSIFSNYTYGNDTVTAVELGDRTLAENIFSNSPIEDVELAKHLVRKGSFFEQDLDTLPNFTSEGYGSIRRVYVYGEEDQIFSRDFQLWQINNYKPDKVYCVPSADHKIQISKVNELAQILQEVANSASDLLAVA

SEQ ID NO: 497 - DNA, 789 bp, synthetic construct
  misc_feature 1..789: note = Round 2 (Activity)
  source 1..789: mol_type = other DNA
atggttagtgcgcattttattctgatccacagtatttgccatggcgcctggctctggtataaactgatcccgttattacagtctgcaggtcataacgttacggcgattgatctttgggctagcgggatcgaccctcgccaactggaacagattggcacatgggagcagtactcagaaccattgttcaccctgatcgaatcgattccggaaggtaagaaagtcattctggtaggagaatccggtggcggcatcaatattgcactggccgcggagaaatatccggagaaagtgagcgccctcgtctttcacaacgcacttatgcccgatatcgatcacagtccagcgttcgtgtacaagaaatttagcgaagttttcactgactggaaagattcgatcttcagcaattatacctacggtaacgacacggttaccgcggtggaattgggagatcgtactctggccgagaacatcttctccaattctccgattgaagatgtagaactggcgaaacatctggtccgcaaaggctccttctttgagcaagacttggataccctgccgaactttacgtcggaagggtatggttcaatccgtcgtgtgtatgtttacggcgaagaagaccagatcatgagccgcgattttcagttatggcaaattaataattataagcctgataaagtgtactgtatcccgagtgctgaccacaagattcagatcagcaaagtcaacgagctggcccagattctccaagaagttgcaaactctgcgagtgatcttcttgcagtggct

SEQ ID NO: 498 - protein, 263 aa, synthetic construct
  REGION 1..263: note = Round 2 (Activity)
MVSAHFILIHSICHGAWLWYKLIPLLQSAGHNVTAIDLWASGIDPRQLEQIGTWEQYSEPLFTLIESIPEGKKVILVGESGGGINIALAAEKYPEKVSALVFHNALMPDIDHSPAFVYKKFSEVFTDWKDSIFSNYTYGNDTVTAVELGDRTLAENIFSNSPIEDVELAKHLVRKGSFFEQDLDTLPNFTSEGYGSIRRVYVYGEEDQIMSRDFQLWQINNYKPDKVYCIPSADHKIQISKVNELAQILQEVANSASDLLAVA

SEQ ID NO: 499 - DNA, 789 bp, synthetic construct
  misc_feature 1..789: note = Round 2 (Selectivity)
  source 1..789: mol_type = other DNA
atggttagtgcgcattttattctgatccacagtatttgccatggcgcctggctctggtataaactgatcccgttattacagtctgcaggtcataacgctacggcgattgatcttgtggctagcgggatcgaccctcgccaactggaacagattggcacatgggagcagtactcagaaccattgttcaccctgatcgaatcgattccggaaggtaagaaagtcattctggtaggagaatccggtggcggcatcaatattgcactggccgcggagaaatatccggagaaagtgagcgccctcgtctttcacaacgcacttatgcccgatatcgatcacagtccagcgttcgtgctgaagaaatatagcgaagttttcactgactggaaagattcgatcttcagcaattatacctacggtaacgacacggttaccgcggtggaattgggagatcgtactctggccgagaacatcttctccaattctccgattgaagatgtagaactggcgaaacatctggtccgcaaaggctccttctttgagcaagacttggataccctgccgaactttacgtcggaagggtatggttcagtccgtcgtgtgtatgtttacggcgaagaagaccagatctttagccgcgattttcagttatggcaaattaataattataagcctgataaagtgtactgtgtaccgagtgctgaccacaagattcagatcagcaaagtcaacgagctggcccagattctccaagaagttgcaaactctgcgagtgatcttcttgcagtggct

SEQ ID NO: 500 - protein, 263 aa, synthetic construct
  REGION 1..263: note = Round 2 (Selectivity)
MVSAHFILIHSICHGAWLWYKLIPLLQSAGHNATAIDLVASGIDPRQLEQIGTWEQYSEPLFTLIESIPEGKKVILVGESGGGINIALAAEKYPEKVSALVFHNALMPDIDHSPAFVLKKYSEVFTDWKDSIFSNYTYGNDTVTAVELGDRTLAENIFSNSPIEDVELAKHLVRKGSFFEQDLDTLPNFTSEGYGSVRRVYVYGEEDQIFSRDFQLWQINNYKPDKVYCVPSADHKIQISKVNELAQILQEVANSASDLLAVA

SEQ ID NO: 501 - DNA, 789 bp, synthetic construct
  misc_feature 1..789: note = Round 2 (Activity)
  source 1..789: mol_type = other DNA
atggttagtgcgcattttattctgatccacagtatttgccatggcgcctggctctggtataaactgatcccgttattacagtctgcaggtcataacgctacggcgattgatcttgtggctagcgggatggaccctcgccaactggaacagattggcacatgggagcagtactcagaaccattgttcaccctgatcgaatcgattccggaaggtaagaaagtcattctggtaggagaatccggtggcggcatcaatattgcactggccgcggagaaatatccggagaaagtgagcgccctcgtctttcacaacgcacttatgcccgatatcgatcacagtccagcgttcgtgtacaagaaatttagcgaagttttcactgactggaaagattcgatcttcagcaattatacctacggtaacgacacggttaccgcggtggaattgggagatcgtactctggccgagaacatcttctccaattctccgattgaagatgtagaactggcgaaacatctggtccgcaaaggctccttctttgagcaagacttggataccctgccgaactttacgtcggaagggtatggttcaattcgtcgtgtgtatgtttacggcgaagaagaccagatctttagccgcgattttcagttatggcaaattaataattataagcctgataaagtgtactgtgtaccgagtgctgaccacaagattcagatcagcaaagtcaacgagctggcccagattctccaagaagttgcaaactctgcgagtgatcttcttgcagtggct

SEQ ID NO: 502 - protein, 263 aa, synthetic construct
  REGION 1..263: note = Round 2 (Activity)
MVSAHFILIHSICHGAWLWYKLIPLLQSAGHNATAIDLVASGMDPRQLEQIGTWEQYSEPLFTLIESIPEGKKVILVGESGGGINIALAAEKYPEKVSALVFHNALMPDIDHSPAFVYKKFSEVFTDWKDSIFSNYTYGNDTVTAVELGDRTLAENIFSNSPIEDVELAKHLVRKGSFFEQDLDTLPNFTSEGYGSIRRVYVYGEEDQIFSRDFQLWQINNYKPDKVYCVPSADHKIQISKVNELAQILQEVANSASDLLAVA

SEQ ID NO: 503 - DNA, 789 bp, synthetic construct
  misc_feature 1..789: note = Round 2 (Activity)
  source 1..789: mol_type = other DNA
atggttagtgcgcattttattctgatccacagtatttgccatggcgcctggctctggtataaactgatcccgttattacagtctgcaggtcataacgctacggcgattgatcttgtggctagcgggatcgaccctcgccaactggaacagattggcacatgggagcagtactcagaaccattgttcaccctgatcgaatcgattccggaaggtaagaaagtcattctggtaggagaatccggtggcggcatcaatattgcactggccgcggagaaatatccggagaaagtgagcgccctcgtctttctgaacgcacttatgcccgatatcgatcacagtccagcgttcgtgtacaagaaatttagcgaagttttcactgactggaaagattcgatcttcagcaattatacctacggtaacgacacggttaccgcggtggaattgggagatcgtactctggccgagaacatcttctccaattctccgattgaagatgtagaactggcgaaacatctggtccgcaaaggctccttctttgagcaagacttggataccctgccgaactttacgtcggaagggtatggttcaattcgtcgtgtgtatgtttacggcgaagaagaccagatctttagccgcgattttcagttatggcaaattaataattataagcctgataaagtgtactgtgtaccgagtgctgaccacaagattcagatcagcaaagtcaacgagctggcccagattctccaagaagttgcaaactctgcgagtgatcttcttgcagtggct

SEQ ID NO: 504 - protein, 263 aa, synthetic construct
  REGION 1..263: note = Round 2 (Activity)
MVSAHFILIHSICHGAWLWYKLIPLLQSAGHNATAIDLVASGIDPRQLEQIGTWEQYSEPLFTLIESIPEGKKVILVGESGGGINIALAAEKYPEKVSALVFLNALMPDIDHSPAFVYKKFSEVFTDWKDSIFSNYTYGNDTVTAVELGDRTLAENIFSNSPIEDVELAKHLVRKGSFFEQDLDTLPNFTSEGYGSIRRVYVYGEEDQIFSRDFQLWQINNYKPDKVYCVPSADHKIQISKVNELAQILQEVANSASDLLAVA

SEQ ID NO: 505 - DNA, 789 bp, synthetic construct
  misc_feature 1..789: note = Round 2 (Activity)
  source 1..789: mol_type = other DNA
atggttagtgcgcattttattctgatccacagtatttgccatggcgcctggctgtggtataaactgatcccgttattacagtctgcaggtcataacgctacggcgattgatcttgtggctagcgggatcgaccctcgccaactggaacagattggcacatgggagcagtactcagaaccattgttcaccctgatcgaatcgattccggaaggtaagaaagtcattctggtaggagaatccggtggcggcatcaatattgcactggccgcggagaaatatccggagaaagtgagcgccctcgtctttcacaacgcacttatgcccgatatcgatcacagtccagcgttcgtgtataagaaatttagcgaagttttcactgactggaaagattcgatcttcagcaattatacctacggtaacgacacggttaccgcggtggaattgggagatcgttttctggccgagaacatcttctccaattctccgattgaagatgtagaactggcgaaacatctggtccgcaaaggctccttctttgagcaagacttggataccctgccgaactttacgtcggaagggtatggttcaattcgtcgtgtgtatgtttacggcgaagaagaccagatctttagccgcgattttcagttatggcaaattaataattataagcctgataaagtgtactgtgtaccgagtgctgaccacaagattcagatcagcaaagtcaacgagctggcccagattctccaagaagttgcaaactctgcgagtgatcttcttgcagtggct

SEQ ID NO: 506 - protein, 263 aa, synthetic construct
  REGION 1..263: note = Round 2 (Activity)
MVSAHFILIHSICHGAWLWYKLIPLLQSAGHNATAIDLVASGIDPRQLEQIGTWEQYSEPLFTLIESIPEGKKVILVGESGGGINIALAAEKYPEKVSALVFHNALMPDIDHSPAFVYKKFSEVFTDWKDSIFSNYTYGNDTVTAVELGDRFLAENIFSNSPIEDVELAKHLVRKGSFFEQDLDTLPNFTSEGYGSIRRVYVYGEEDQIFSRDFQLWQINNYKPDKVYCVPSADHKIQISKVNELAQILQEVANSASDLLAVA

SEQ ID NO: 507 - DNA, 789 bp, synthetic construct
  misc_feature 1..789: note = Round 2 (Activity)
  source 1..789: mol_type = other DNA
atggttagtgcgcattttattctgatccacagtatttgccatggcgcctggctctggtataaactgatcccgttattacagtctgcaggtcataacgctacggcgattgatctttgggctagcgggatcgaccctcgccaactggaacagattggcacatgggagcagtactcagaaccattgttcaccctgatcgaatcgattccggaaggtaagaaagtcattctggtaggagaatccggtggcggcatcaatattgcactggccgcggagaaatatccggagaaagtgagcgccctcgtctttagtaacgcacttatgcccgatatcgatcacagtccagcgttcgtgtacaagaaatttagcgaagttcctactggctggaaagattcgatcttcagcaattatacctacggtaacgacacggttaccgcgctggaattgggaccacgtactctggccgagaacatcttctccaattctccgattgaagatgtagaactggcgaaacatctggtccgcaaaggctccttctttgagcaagacttggataccctgccgaactttacgtcggaagggtatggttcaattcgtcgtgtgtatgtttacggcgaagaagaccagatttttagccgcgattttcagttatggcaaattaataattataagcctgataaagtgtactgtgtaccgagtgctgaccacaagattcagatcagcaaagtcaacgagctggcccagattctccaagaagttgcaaactctgcgagtgatcttcttgcagtggct

SEQ ID NO: 508 - protein, 263 aa, synthetic construct
  REGION 1..263: note = Round 2 (Activity)
MVSAHFILIHSICHGAWLWYKLIPLLQSAGHNATAIDLWASGIDPRQLEQIGTWEQYSEPLFTLIESIPEGKKVILVGESGGGINIALAAEKYPEKVSALVFSNALMPDIDHSPAFVYKKFSEVPTGWKDSIFSNYTYGNDTVTALELGPRTLAENIFSNSPIEDVELAKHLVRKGSFFEQDLDTLPNFTSEGYGSIRRVYVYGEEDQIFSRDFQLWQINNYKPDKVYCVPSADHKIQISKVNELAQILQEVANSASDLLAVA

SEQ ID NO: 509 - DNA, 789 bp, synthetic construct
  misc_feature 1..789: note = Round 2 (Activity)
  source 1..789: mol_type = other DNA
atggttagtgcgcattttattctggttcacagtatttgtcatggcgcctggctctggtataaactgatcccgttattacagtctgcaggtcataacgctacggcgattgatctttgggctagcgggatcgaccctcgccaactggaacagattggcacatgggagcagtactcagaaccattgttcaccctgatcgaatcgattccggaaggtaagaaagtcattctggtaggagaatccggtggcggcatcaatattgcactggccgcggagaaatatccggagaaagtgagcgccctcgtctttcacaacgcacttatgcccgatatcgatcacagtccagcgttcgtgtacaagaaatttactgaagttttcactgactggaaagattcgatcttcagcaattatacctacggtaacgacacggttaccgcggtggaattgggagatcgtactctggccgagaacgtcttctccaattctccgattgaagatgtagaactggcgaaacatctggtccgcaaaggctccttctttgagcaagacttggataccctgccgaactttacgtcggaagggtatggttcaattcgtcgtgtgtatgtttacggcgaagaagaccagatctttagccgcgattttcagttatggcaaattaataattataagcctgataaagtgtactgtgtaccgagtgctgaccacaagattcagattagcaaagtcaacgagctggcccagattctccaagaagttgcaaactctgcgagtgatcttcttgcagtggct

SEQ ID NO: 510 - protein, 263 aa, synthetic construct
  REGION 1..263: note = Round 2 (Activity)
MVSAHFILVHSICHGAWLWYKLIPLLQSAGHNATAIDLWASGIDPRQLEQIGTWEQYSEPLFTLIESIPEGKKVILVGESGGGINIALAAEKYPEKVSALVFHNALMPDIDHSPAFVYKKFTEVFTDWKDSIFSNYTYGNDTVTAVELGDRTLAENVFSNSPIEDVELAKHLVRKGSFFEQDLDTLPNFTSEGYGSIRRVYVYGEEDQIFSRDFQLWQINNYKPDKVYCVPSADHKIQISKVNELAQILQEVANSASDLLAVA

SEQ ID NO: 511 - DNA, 789 bp, synthetic construct
  misc_feature 1..789: note = Round 2 (Selectivity)
  source 1..789: mol_type = other DNA
atggttagtgcgcattttattctgatccacagtatttgccatggcgcctggctgtggtataaactgatcccgttattacagtctgcaggtcataacgctacggcgattgatcttgtggctagcgggatcgaccctcgccaactggaacagattggcacatgggagcagtactcagaaccattgttcaccctgatcgaatcgattccggaaggtaagaaagtcattctggtaggagaatccggtggcggcatcaatattgcactggccgcggagaaatatccggagaaagtgagcgccctcgtctttcacaacgcacttatgcccgatatcgatcacagtccagcgttcgtgctgaagaaatatagcgaagttttcactgactggaaagattcgatcttcagcaattatacctacggtaacgacacggttaccgcggtggaattgggagatcgtactctggccgagaacatcttctccaattctccgattgaagatgtagaactggcgaaacatctggtccgccctggctccttctttgagcaagacttggataccctgccgaactttacgtcggaagggtatggttcaattcgtcgtgtgtatgtttacggcgaagaagaccagatctttagccgcgattttcagttatggcaaattaataattataagcctgataaagtgtactgtgtcccgagtgctgaccacaagattcagatcagcaaagtcaacgagctggcccagattctccaagaagttgcaaactctgcgagtgatcttcttgcagtggct

SEQ ID NO: 512 - protein, 263 aa, synthetic construct
  REGION 1..263: note = Round 2 (Selectivity)
MVSAHFILIHSICHGAWLWYKLIPLLQSAGHNATAIDLVASGIDPRQLEQIGTWEQYSEPLFTLIESIPEGKKVILVGESGGGINIALAAEKYPEKVSALVFHNALMPDIDHSPAFVLKKYSEVFTDWKDSIFSNYTYGNDTVTAVELGDRTLAENIFSNSPIEDVELAKHLVRPGSFFEQDLDTLPNFTSEGYGSIRRVYVYGEEDQIFSRDFQLWQINNYKPDKVYCVPSADHKIQISKVNELAQILQEVANSASDLLAVA

SEQ ID NO: 513 - DNA, 789 bp, synthetic construct
  misc_feature 1..789: note = Round 2 (Activity)
  source 1..789: mol_type = other DNA
atggttagtgcgcattttattctgatccacagtatttgccatggcgcctggctgtggtataaactgatcccgttattacagtctgcaggtcataacgttacggcgattgatctttgggctagcgggatcaaccctcgccaactggaacagattggcacatgggagcagtactcagaaccattgttcaccctgatcgaatcgattccggaaggtaagaaagtcattctggtaggagaatccggtggcggcatcaatattgcactggccgcggagaaatatccggagaaagtgagcgccctcgtctttcacaacgcacttatgcccgatatcgatcacagtccagcgttcgtgtacaagaaatttagcgaagttttcactgactggaaagattcgatcttcagcaattatacctacggtaacgacacggttaccgcggtggaattgggagatcgttttctggccgagaacatcttctccaattctccgattgaagatgtagaactggcgaaacatctggtccgcaaaggctccttctttgagcaagacttggataccctgccgaactttacgtcggaagggtatggttcaattcgtcgtgtgtatgtttacggcgaagaagaccagatctttagccgcgattttcagttatggcaaattaataattataagcctgataaagtgtactgtgtcccgagtgctgaccacaagattcagatcagcaaagtcaacgagctggcccagattctccaagaagttgcaaactctgcgagtgatcttcttgcagtggct

SEQ ID NO: 514 - protein, 263 aa, synthetic construct
  REGION 1..263: note = Round 2 (Activity)
MVSAHFILIHSICHGAWLWYKLIPLLQSAGHNVTAIDLWASGINPRQLEQIGTWEQYSEPLFTLIESIPEGKKVILVGESGGGINIALAAEKYPEKVSALVFHNALMPDIDHSPAFVYKKFSEVFTDWKDSIFSNYTYGNDTVTAVELGDRFLAENIFSNSPIEDVELAKHLVRKGSFFEQDLDTLPNFTSEGYGSIRRVYVYGEEDQIFSRDFQLWQINNYKPDKVYCVPSADHKIQISKVNELAQILQEVANSASDLLAVA

SEQ ID NO: 515 - DNA, 789 bp, synthetic construct
  misc_feature 1..789: note = Round 2 (Selectivity)
  source 1..789: mol_type = other DNA
atggttagtgcgcattttattctgatccacagtatttgccatggcgcctggctctggtataaactgatcccgttattacagtctgcaggtcataacgctacggcgattgatcttgtggctagcgggagtgaccctcgccaactggaacagattggcacatgggagcagtactcagaaccattgttcaccctgatcgaatcgattccggaaggtaagaaagtcattctggtaggagaatccggtggcggcatcaatattgcactggccgcggagaaatatccggagaaagtgagcgccctcgtctttcacaacgcacttatgcccgatatcgatcacagtccagcgttcgtgtacaagaaatttagcgaagttttcactgactggaaagattcgatcttcagcaattatacctacggtaacgacacggttaccgcggtggaattgggagatcgtactctggccgagaacatcttctccaattctccgattgaagatgtagaactggcgaaacatctggtccgcaaaggctccttctttgagcaagacttggataccctgccgaactttacgtcggaagggtatggttcaattcgtcgtgtgtatgtttacggcgaagaagaccagatctttagccgcgattttcagttatggcaaattaataattataagcctgataaagtgtactgtgtaccgagtgctgaccacaagattcagatcagcaaagtcaacgagctggcccagattctccaagaagttgcaaactctgcgagtgatcttcttgcagtggct

SEQ ID NO: 516 - protein, 263 aa, synthetic construct
  REGION 1..263: note = Round 2 (Selectivity)
MVSAHFILIHSICHGAWLWYKLIPLLQSAGHNATAIDLVASGSDPRQLEQIGTWEQYSEPLFTLIESIPEGKKVILVGESGGGINIALAAEKYPEKVSALVFHNALMPDIDHSPAFVYKKFSEVFTDWKDSIFSNYTYGNDTVTAVELGDRTLAENIFSNSPIEDVELAKHLVRKGSFFEQDLDTLPNFTSEGYGSIRRVYVYGEEDQIFSRDFQLWQINNYKPDKVYCVPSADHKIQISKVNELAQILQEVANSASDLLAVA

SEQ ID NO: 517 - DNA, 789 bp, synthetic construct
  misc_feature 1..789: note = Round 2 (Activity)
  source 1..789: mol_type = other DNA
atggttagtgcgcattttattctgatccacagtatttgccatggcgcctggctctggtataaactgatcccgttattacagtctgcaggtcataacgctacggcgattgatcttgtggctagcgggatcgaccctcgccaactggaacagattggcacatgggagcagtactcagaaccattgttcaccctgatcgaatcgattccggaaggtaagaaagtcattctggtaggagaatccggtggcggcatcaatattgcactggccgcggagaaatatccggagaaagtgagcgccctcgtctttcaaaacgcacttatgcccgatatcgatcacagtccagcgttcgtgtacaagaaatttagcgaagttttcactgactggaaagattcgatcttcagcaattatacctacggtaacgacacggttaccgcggtggaattgggagatcgtactctggccgagaacatcttctccaattctccgattgaagatgtagaactggcgaaacatctggtccgcaaaggctccttctttgagcaagacttggataccctgccgaactttacgtcggaagggtatggttcaattcgtcgtgtgtatgtttacggcgaagaagaccagatttttagccgcgattttcagttatggcaaattaataattataagcctgataaagtgtactgtgtaccgagtgctgaccacaagattcagatcagcaaagtcaacgagctggcccagattctccaagaagttgcaaactctgcgagtgatcttcttgcagtggct

SEQ ID NO: 518 - protein, 263 aa, synthetic construct
  REGION 1..263: note = Round 2 (Activity)
MVSAHFILIHSICHGAWLWYKLIPLLQSAGHNATAIDLVASGIDPRQLEQIGTWEQYSEPLFTLIESIPEGKKVILVGESGGGINIALAAEKYPEKVSALVFQNALMPDIDHSPAFVYKKFSEVFTDWKDSIFSNYTYGNDTVTAVELGDRTLAENIFSNSPIEDVELAKHLVRKGSFFEQDLDTLPNFTSEGYGSIRRVYVYGEEDQIFSRDFQLWQINNYKPDKVYCVPSADHKIQISKVNELAQILQEVANSASDLLAVA

SEQ ID NO: 519 - DNA, 789 bp, synthetic construct
  misc_feature 1..789: note = Round 2 (Activity)
  source 1..789: mol_type = other DNA
atggttagtgcgcattttattctgatccacagtatttgccatggcgcctggctgtggtataaactgatcccgttattacagtctgcaggtcataacgctacggcgattgatctttgggctagcgggatcaaccctcgccaactggaacagattggcacatgggagcagtactcagaaccattgttcaccctgatcgaatcgattccggaaggtaagaaagtcattctggtaggagaatccggtggcggcatcaatattgcactggccgcggagaaatatccggagaaagtgagcgccctcgtctttcacaacgcacttatgcccgatatcgatcacagtccagcgttcgtgtacaagaaatttagcgaagttttcactgactggaaagattcgatcttcagcaattatacctacggtaacgacacggttaccgcggtggaattgggagatcgttttctggccgagaacatcttctccaattctccgattgaagatgtagaactggcgaaacatctggtccgcaaaggctccttctttgagcaagacttggataccctgccgaactttacgtcggaagggtatggttcaattcgtcgtgtgtatgtttacggcgaagaagaccagatctttagccgcgattttcagttatggcaaattaataattataagcctgataaagtgtactgtatcccgagtgctgaccacaagattcagatcagcaaagtcaacgagctggcccagattctccaagaagttgcaaactctgcgagtgatcttcttgcagtggct

SEQ ID NO: 520 - protein, 263 aa, synthetic construct
  REGION 1..263: note = Round 2 (Activity)
MVSAHFILIHSICHGAWLWYKLIPLLQSAGHNATAIDLWASGINPRQLEQIGTWEQYSEPLFTLIESIPEGKKVILVGESGGGINIALAAEKYPEKVSALVFHNALMPDIDHSPAFVYKKFSEVFTDWKDSIFSNYTYGNDTVTAVELGDRFLAENIFSNSPIEDVELAKHLVRKGSFFEQDLDTLPNFTSEGYGSIRRVYVYGEEDQIFSRDFQLWQINNYKPDKVYCIPSADHKIQISKVNELAQILQEVANSASDLLAVA

SEQ ID NO: 521 - DNA, 789 bp, synthetic construct
  misc_feature 1..789: note = Round 2 (Activity)
  source 1..789: mol_type = other DNA
atggttagtgcgcattttattctgatccacagtatttgccatggcgcctggctctggtataaactgatcccgttattacagtctgcaggtcataacgctacggcgattgatcttgtggctagcgggatcgaccctcgccaactggaacagattggcacatgggagcagtactcagaaccattgttcaccctgatcgaatcgattccggaaggtaagaaagtcattctggtaggagaatccggtggcggcatcaatattgcactggccgcggagaaatatccggagaaagtgagcgccctcgtctttcacaacgcacttatgcccgatatcgatcacagtccagcgttcgtgtacaagaaatttagcgaagttttcactgactggaaagattcgatcttcagcaattatacctacggtaacgacacggttaccgcggtggaattgggagatcgtactctggccgagaacatcttccagaattctccgattgaagatgtagaactggcgaaacatctggtccgcaaaggctccttctttgagcaagacttggataccctgccgaactttacgtcggaagggtatggttcaattcgtcgtgtgtatgtttacggcgaagaagaccagatctttagccgcgattttcagttatggcaaattaataattataagcctgataaagtgtactgtgtaccgagtgctgaccacaagattcagatcagcaaagtcaacgagctggcccagattctccaagaagttgcaaactctgcgagtgatcttcttgcagtggct

SEQ ID NO: 522 - protein, 263 aa, synthetic construct
  REGION 1..263: note = Round 2 (Activity)
MVSAHFILIHSICHGAWLWYKLIPLLQSAGHNATAIDLVASGIDPRQLEQIGTWEQYSEPLFTLIESIPEGKKVILVGESGGGINIALAAEKYPEKVSALVFHNALMPDIDHSPAFVYKKFSEVFTDWKDSIFSNYTYGNDTVTAVELGDRTLAENIFQNSPIEDVELAKHLVRKGSFFEQDLDTLPNFTSEGYGSIRRVYVYGEEDQIFSRDFQLWQINNYKPDKVYCVPSADHKIQISKVNELAQILQEVANSASDLLAVA

SEQ ID NO: 523 - DNA, 789 bp, synthetic construct
  misc_feature 1..789: note = Round 2 (Activity)
  source 1..789: mol_type = other DNA
atggttagtgcgcattttattctgatccacagtatttgccatggcgcctggctgtggtataaactgatcccgttattacagtctgcaggtcataacgttacggcgattgatctttgggctagcgggatcgaccctcgccaactggaacagattggcacatgggagcagtactcagaaccattgttcaccctgatcgaatcgattccggaaggtaagaaagtcattctggtaggagaatccggtggcggcatcaatattgcactggccgcggagaaatatccggagaaagtgagcgccctcgtctttcacaacgcacttatgcccgatatcgatcacagtccagcgttcgtgtacaagaaatttagcgaagttttcactgactggaaagattcgatcttcagcaattatacctacggtaacgacacggttaccgcggtggaattgggagatcgtactctggccgagaacatcttctccaattctccgattgaagatgtagaactggcgaaacatctggtccgcaaaggctccttctttgagcaagacttggataccctgccgaactttacgtcggaagggtatggttcaattcgtcgtgtgtatgtttacggcgaagaagaccagatcatgagccgcgattttcagttatggcaaattaataattataagcctgataaagtgtactgtgtcccgagtgctgaccacaagattcagatcagcaaagtcaacgagctggcccagattctccaagaagttgcaaactctgcgagtgatcttcttgcagtggct

SEQ ID NO: 524 - protein, 263 aa, synthetic construct
  REGION 1..263: note = Round 2 (Activity)
MVSAHFILIHSICHGAWLWYKLIPLLQSAGHNVTAIDLWASGIDPRQLEQIGTWEQYSEPLFTLIESIPEGKKVILVGESGGGINIALAAEKYPEKVSALVFHNALMPDIDHSPAFVYKKFSEVFTDWKDSIFSNYTYGNDTVTAVELGDRTLAENIFSNSPIEDVELAKHLVRKGSFFEQDLDTLPNFTSEGYGSIRRVYVYGEEDQIMSRDFQLWQINNYKPDKVYCVPSADHKIQISKVNELAQILQEVANSASDLLAVA

SEQ ID NO: 525 - DNA, 789 bp, synthetic construct
  misc_feature 1..789: note = Round 2 (Activity)
  source 1..789: mol_type = other DNA
atggttagtgcgcattttattctgatccacagtatttgccatggcgcctggctgtggtataaactgatcccgttattacagtctgcaggtcataacgttacggcgattgatctttgggctagcgggatcgaccctcgccaactggaacagattggcacatgggagcagtactcagaaccattgttcaccctgatcgaatcgattccggaaggtaagaaagtcattctggtaggagaatccggtggcggcatcaatattgcactggccgcggagaaatatccggagaaagtgagcgccctcgtctttcacaacgcacttatgcccgatatcgatcacagtccagcgttcgtgtacaagaaatttagcgaagttttcactgactggaaagattcgatcttcagcaattatacctacggtaacgacacggttaccgcggtggaattgggagatcgtactctggccgagaacatcttctccaattctccgattgaagatgtagaactggcgaaacatctggtccgcaaaggctccttctttgagcaagacttggataccctgccgaactttacgtcggaagggtatggttcaattcgtcgtgtgtatgtttacggcgaagaagaccagatctttagccgcgattttcagttatggcaaattaataattataagcctgataaagtgtactgtgtaccgagtgctgaccacaagattcagatcagcaaagtcaacgagctggcccagattctccaagaagttgcaaactctgcgagtgatcttcttgcagtggct

SEQ ID NO: 526 - protein, 263 aa, synthetic construct
  REGION 1..263: note = Round 2 (Activity)
MVSAHFILIHSICHGAWLWYKLIPLLQSAGHNVTAIDLWASGIDPRQLEQIGTWEQYSEPLFTLIESIPEGKKVILVGESGGGINIALAAEKYPEKVSALVFHNALMPDIDHSPAFVYKKFSEVFTDWKDSIFSNYTYGNDTVTAVELGDRTLAENIFSNSPIEDVELAKHLVRKGSFFEQDLDTLPNFTSEGYGSIRRVYVYGEEDQIFSRDFQLWQINNYKPDKVYCVPSADHKIQISKVNELAQILQEVANSASDLLAVA

SEQ ID NO: 527 - DNA, 789 bp, synthetic construct
  misc_feature 1..789: note = Round 2 (Activity)
  source 1..789: mol_type = other DNA
atggttagtgcgcattttattctgatccacagtatttgccatggcgcctggctctggtataaactgatcccgttattacagtctgcaggtcataacgctacggcgattgatcttgtggctagcgggatcgaccctcgccaactggaacagattggcacatgggagcagtactcagaaccattgttcaccctgatcgaatcgattccggaaggtaagaaagtcattctggtaggagaatccggtggcggcatcaatattgcactggccgcggagaaatatccggagaaagtgagcgccctcgtctttatgaacgcacttatgcccgatatcgatcacagtccagcgttcgtgtacaagaaatttagcgaagttcctactgactggaaagattcgatcttcagcaattatacctacggtaacgacacggttaccgcgctggaattgggagaccgtactctggccgagaacatcttctccaattctccgattgaagatgtagaactggcgaaacatctggtccgcaaaggctccttctttgagcaagacttggataccctgccgaactttacgtcggaagggtatggttcaattcgtcgtgtgtatgtttacggcgaagaagaccagatttttagccgcgattttcagttatggcaaattaataattataagcctgataaagtgtactgtgtaccgagtgctgaccacaagattcagatcagcaaagtcaacgagctggcccagattctccaagaagttgcaaactctgcgagtgatcttcttgcagtggct

SEQ ID NO: 528 - protein, 263 aa, synthetic construct
  REGION 1..263: note = Round 2 (Activity)
MVSAHFILIHSICHGAWLWYKLIPLLQSAGHNATAIDLVASGIDPRQLEQIGTWEQYSEPLFTLIESIPEGKKVILVGESGGGINIALAAEKYPEKVSALVFMNALMPDIDHSPAFVYKKFSEVPTDWKDSIFSNYTYGNDTVTALELGDRTLAENIFSNSPIEDVELAKHLVRKGSFFEQDLDTLPNFTSEGYGSIRRVYVYGEEDQIFSRDFQLWQINNYKPDKVYCVPSADHKIQISKVNELAQILQEVANSASDLLAVA

SEQ ID NO: 529 - DNA, 789 bp, synthetic construct
  misc_feature 1..789: note = Round 2 (Activity)
  source 1..789: mol_type = other DNA
atggttagtgcgcattttattctgatccacagtatttgccatggcgcctggctctggtataaactgatcccgttattacagtctgcaggtcataacgctacggcgattgatctttgggctagcgggatcgaccctcgccaactggaacagattggcacatgggagcagtactcagaaccattgttcaccctgatcgaatcgattccggaaggtaagaaagtcattctggtaggagaatccggtggcggcatcaatattgcactggccgcggagaaatatccggagaaagtgagcgccctcgtctttagtaacgcacttatgcccgatatcgatcacagtccagcgttcgtgtacaagaaatttagcgaagtttttactggctggaaagattcgatcttcagcaattatacctacggtaacgacacggttaccgcggtggaattgggaccacgtactctggccgagaacatcttctccaattctccgattgaagatgtagaactggcgaaacatctggtccgcaaaggctccttctttgagcaagacttggataccctgccgaactttacgtcggaagggtatggttcaattcgtcgtgtgtatgtttacggcgaagaagaccagatttttagccgcgattttcagttatggcaaattaataattataagcctgataaagtgtactgtgtaccgagtgctgaccacaagattcagatcagcaaagtcaacgagctggcccagattctccaagaagttgcaaactctgcgagtgatcttcttgcagtggct

SEQ ID NO: 530 - protein, 263 aa, synthetic construct
  REGION 1..263: note = Round 2 (Activity)
MVSAHFILIHSICHGAWLWYKLIPLLQSAGHNATAIDLWASGIDPRQLEQIGTWEQYSEPLFTLIESIPEGKKVILVGESGGGINIALAAEKYPEKVSALVFSNALMPDIDHSPAFVYKKFSEVFTGWKDSIFSNYTYGNDTVTAVELGPRTLAENIFSNSPIEDVELAKHLVRKGSFFEQDLDTLPNFTSEGYGSIRRVYVYGEEDQIFSRDFQLWQINNYKPDKVYCVPSADHKIQISKVNELAQILQEVANSASDLLAVA

SEQ ID NO: 531 - DNA, 789 bp, synthetic construct
  misc_feature 1..789: note = Round 2 (Selectivity)
  source 1..789: mol_type = other DNA
atggttagtgcgcattttattctgatccacagtatttgccatggcgcctggctgtggtataaactgatcccgttattacagtctgcaggtcataacgctacggcgattgatcttgtggctagcgggatcgaccctcgccaactggaacagattggcacatgggagcagtactcagaaccattgttcaccctgatcgaatcgattccggaaggtaagaaagtcattctggtaggagaatccggtggcggcatcaatattgcactggccgcggagaaatatccggagaaagtgagcgccctcgtctttcacaacgcacttatgcccgatatcgatcacagtccagcgttcgtgctgaagaaatatagcgaagttttcactgactggaaagattcgatcttcagcaattatacctacggtaacgacacggttaccgcggtggaattgggagatcgtactctggccgagaacatcttctccaattctccgattgaagatgtagaactggcgaaacatctggtccgcaagggctccttctttgagcaagacttggataccctgccgaactttacgtcggaagggtatggttcaattcgtcgtgtgtatgtttacggcgaagaagaccagatctttagccgcgattttcagttatggcaaattaataattataagcctgataaagtgtactgtgtaccgagtgctgaccacaagattcagatcagcaaagtcaacgagctggcccagattctccaagaagttgcaaactctgcgagtgatcttcttgcagtggct

SEQ ID NO: 532 - protein, 263 aa, synthetic construct
  REGION 1..263: note = Round 2 (Selectivity)
MVSAHFILIHSICHGAWLWYKLIPLLQSAGHNATAIDLVASGIDPRQLEQIGTWEQYSEPLFTLIESIPEGKKVILVGESGGGINIALAAEKYPEKVSALVFHNALMPDIDHSPAFVLKKYSEVFTDWKDSIFSNYTYGNDTVTAVELGDRTLAENIFSNSPIEDVELAKHLVRKGSFFEQDLDTLPNFTSEGYGSIRRVYVYGEEDQIFSRDFQLWQINNYKPDKVYCVPSADHKIQISKVNELAQILQEVANSASDLLAVA

SEQ ID NO: 533 - DNA, 789 bp, synthetic construct
  misc_feature 1..789: note = Round 2 (Activity)
  source 1..789: mol_type = other DNA
atggttagtgcgcattttattctgatccacagtatttgccatggcgcctggctgtggtataaactgatcccgttattacagtctgcaggtcataacgttacggcgattgatctttgggctagcgggatcaaccctcgccaactggaacagattggcacatgggagcagtactcagaaccattgttcaccctgatcgaatcgattccggaaggtaagaaagtcattctggtaggagaatccggtggcggcatcaatattgcactggccgcggagaaatatccggagaaagtgagcgccctcgtctttcacaacgcacttatgcccgatatcgatcacagtccagcgttcgtgtacaagaaatttagcgaagttttcactgactggaaagattcgatcttcagcaattatacctacggtaacgacacggttaccgcggtggaattgggagatcgtactctggccgagaacatcttctccaattctccgattgaagatgtagaactggcgaaacatctggtccgcaaaggctccttctttgagcaagacttggataccctgccgaactttacgtcggaagggtatggttcaattcgtcgtgtgtatgtttacggcgaagaagaccagatcatgagccgcgattttcagttatggcaaattaataattataagcctgataaagtgtactgtatcccgagtgctgaccacaagattcagatcagcaaagtcaacgagctggcccagattctccaagaagttgcaaactctgcgagtgatcttcttgcagtggct

SEQ ID NO: 534 - protein, 263 aa, synthetic construct
  REGION 1..263: note = Round 2 (Activity)
MVSAHFILIHSICHGAWLWYKLIPLLQSAGHNVTAIDLWASGINPRQLEQIGTWEQYSEPLFTLIESIPEGKKVILVGESGGGINIALAAEKYPEKVSALVFHNALMPDIDHSPAFVYKKFSEVFTDWKDSIFSNYTYGNDTVTAVELGDRTLAENIFSNSPIEDVELAKHLVRKGSFFEQDLDTLPNFTSEGYGSIRRVYVYGEEDQIMSRDFQLWQINNYKPDKVYCIPSADHKIQISKVNELAQILQEVANSASDLLAVA

SEQ ID NO: 535 - DNA, 789 bp, synthetic construct
  misc_feature 1..789: note = Round 2 (Activity)
  source 1..789: mol_type = other DNA
atggttagtgcgcattttattctgatccacagtatttgccatggcgcctggatctggtataaactgatcccgttattacagtctgcaggtcataacgttacggcgattgatcttgtggctagcgggatcgaccctcgccaactggaacagattggcacatgggagcagtactcagaaccattgttcaccctgatcgaatcgattccggaaggtaagaaagtcattctggtaggagaatccggtggcggcatcaatattgcactggccgcggagaaatatccggagaaagtgagcgccctcgtctttcacaacgcacttatgcccgatatcgatcacagtccagcgttcgtgtacaagaaatttagcgaagttttcactgactggaaagattcgatcttcagcaattatacctacggtaacgacacggttaccgcggtggaattgggagatcgtactctggccgagaacatcttctccaattctccgattgaagatgtagaactggcgaaacatctggtccgccctggctccttctttgagcaagacttggataccctgccgaactttacgtcggaagggtatggttcaattcgtcgtgtgtatgtttacggcgaagaagaccagatctttagccgcgattttcagttatggcaaattaataattataagcctgataaagtgtactgtgtaccgagtgctgaccacaagattcagatcagcaaagtcaacgagctggcccagattctccaagaagttgcaaactctgcgagtgatcttcttgcagtggct

SEQ ID NO: 536 - protein, 263 aa, synthetic construct
  REGION 1..263: note = Round 2 (Activity)
MVSAHFILIHSICHGAWIWYKLIPLLQSAGHNVTAIDLVASGIDPRQLEQIGTWEQYSEPLFTLIESIPEGKKVILVGESGGGINIALAAEKYPEKVSALVFHNALMPDIDHSPAFVYKKFSEVFTDWKDSIFSNYTYGNDTVTAVELGDRTLAENIFSNSPIEDVELAKHLVRPGSFFEQDLDTLPNFTSEGYGSIRRVYVYGEEDQIFSRDFQLWQINNYKPDKVYCVPSADHKIQISKVNELAQILQEVANSASDLLAVA

SEQ ID NO: 537 - DNA, 789 bp, synthetic construct
  misc_feature 1..789: note = Round 2 (Activity)
  source 1..789: mol_type = other DNA
atggttagtgcgcattttattctgatccacagtatttgccatggcgcctggctctggtataaactgatcccgttattacagtctgcaggtcataacgctacggcgattgatcttgtggctagcgggcgtgaccctcgccaactggaacagattggcacatgggagcagtactcagaaccattgttcaccctgatcgaatcgattccggaaggtaagaaagtcattctggtaggagaatccggtggcggcatcaatattgcactggccgcggagaaatatccggagaaagtgagcgccctcgtctttcacaacgcacttatgcccgatatcgatcacagtccagcgttcgtgtacaagaaatttagcgaagttttcactgactggaaagattcgatcttcagcaattatacctacggtaacgacacggttaccgcggtggaattgggagatcgtactctggccgagaacatcttctccaattctccgattgaagatgtagaactggcgaaacatctggtccgcaaaggctccttctttgagcaagacttggataccctgccgaactttacgtcggaagggtatggttcaattcgtcgtgtgtatgtttacggcgaagaagaccagatctttagccgcgattttcagttatggcaaattaataattataagcctgataaagtgtactgtgtaccgagtgctgaccacaagattcagatcagcaaagtcaacgagctggcccagattctccaagaagttgcaaactctgcgagtgatcttcttgcagtggct

SEQ ID NO: 538 - protein, 263 aa, synthetic construct
  REGION 1..263: note = Round 2 (Activity)
MVSAHFILIHSICHGAWLWYKLIPLLQSAGHNATAIDLVASGRDPRQLEQIGTWEQYSEPLFTLIESIPEGKKVILVGESGGGINIALAAEKYPEKVSALVFHNALMPDIDHSPAFVYKKFSEVFTDWKDSIFSNYTYGNDTVTAVELGDRTLAENIFSNSPIEDVELAKHLVRKGSFFEQDLDTLPNFTSEGYGSIRRVYVYGEEDQIFSRDFQLWQINNYKPDKVYCVPSADHKIQISKVNELAQILQEVANSASDLLAVA

SEQ ID NO: 539 - DNA, 789 bp, synthetic construct
  misc_feature 1..789: note = Round 2 (Activity)
  source 1..789: mol_type = other DNA
atggttagtgcgcattttattctgatccacagtatttgccatggcgcctggctctggtataaactgatcccgttattacagtctgcaggtcataacgctacggcgattgatcttgtggctagcgggactgaccctcgccaactggaacagattggcacatgggagcagtactcagaaccattgttcaccctgatcgaatcgattccggaaggtaagaaagtcattctggtaggagaatccggtggcggcatcaatattgcactggccgcggagaaatatccggagaaagtgagcgccctcgtctttcacaacgcacttatgcccgatatcgatcacagtccagcgttcgtgtacaagaaatttagcgaagttttcactgactggaaagattcgatcttcagcaattatacctacggtaacgacacggttaccgcggtggaattgggagatcgtactctggccgagaacatcttctccaattctccgattgaagatgtagaactggcgaaacatctggtccgcaaaggctccttctttgagcaagacttggataccctgccgaactttacgtcggaagggtatggttcaattcgtcgtgtgtatgtttacggcgaagaagaccagatctttagccgcgattttcagttatggcaaattaataattataagcctgataaagtgtactgtgtaccgagtgctgaccacaagattcagatcagcaaagtcaacgagctggcccagattctccaagaagttgcaaactctgcgagtgatcttcttgcagtggct

SEQ ID NO: 540 - protein, 263 aa, synthetic construct
  REGION 1..263: note = Round 2 (Activity)
MVSAHFILIHSICHGAWLWYKLIPLLQSAGHNATAIDLVASGTDPRQLEQIGTWEQYSEPLFTLIESIPEGKKVILVGESGGGINIALAAEKYPEKVSALVFHNALMPDIDHSPAFVYKKFSEVFTDWKDSIFSNYTYGNDTVTAVELGDRTLAENIFSNSPIEDVELAKHLVRKGSFFEQDLDTLPNFTSEGYGSIRRVYVYGEEDQIFSRDFQLWQINNYKPDKVYCVPSADHKIQISKVNELAQILQEVANSASDLLAVA

SEQ ID NO: 541 - DNA, 789 bp, synthetic construct
  misc_feature 1..789: note = Round 2 (Selectivity)
  source 1..789: mol_type = other DNA
atggttagtgcgcattttattctgatccacagtatttgccatggcgcctggctgtggtataaactgatcccgttattacagtctgcaggtcataacgctacggcgattgatcttgtggctagcgggatcgaccctcgccaactggaacagattggcacatgggagcagtactcagaaccattgttcaccctgatcgaatcgattccggaaggtaagaaagtcattctggtaggagaatccggtggcggcatcaatattgcactggccgcggagaaatatccggagaaagtgagcgccctcgtctttcacaacgcacttatgcccgatatcgatcacagtccagcgttcgtgtataagaaatatagcgaagttttcactgactggaaagattcgatcttcagcaattatacctacggtaacgacacggttaccgcggtggaattgggagatcgtactctggccgagaacatcttctccaattctccgattgaagatgtagaactggcgaaacatctggtccgcaaaggctccttctttgagcaagacttggataccctgccgaactttacgtcggaagggtatggttcaattcgtcgtgtgtatgtttacggcgaagaagaccagatctttagccgcgattttcagttatggcaaattaataattataagcctgataaagtgtactgtgtaccgagtgctgaccacaagattcagatcagcaaagtcaacgagctggcccagattctccaagaagttgcaaactctgcgagtgatcttcttgcagtggct

SEQ ID NO: 542 - protein, 263 aa, synthetic construct
  REGION 1..263: note = Round 2 (Selectivity)
MVSAHFILIHSICHGAWLWYKLIPLLQSAGHNATAIDLVASGIDPRQLEQIGTWEQYSEPLFTLIESIPEGKKVILVGESGGGINIALAAEKYPEKVSALVFHNALMPDIDHSPAFVYKKYSEVFTDWKDSIFSNYTYGNDTVTAVELGDRTLAENIFSNSPIEDVELAKHLVRKGSFFEQDLDTLPNFTSEGYGSIRRVYVYGEEDQIFSRDFQLWQINNYKPDKVYCVPSADHKIQISKVNELAQILQEVANSASDLLAVA

SEQ ID NO: 543 - DNA, 789 bp, synthetic construct
  misc_feature 1..789: note = Round 2 (Activity)
  source 1..789: mol_type = other DNA
atggttagtgcgcattttattctgatccacagtatttgccatggcgcctggctgtggtataaactgatcccgttattacagtctgcaggtcataacgctacggcgattgatctttgggctagcgggatcgaccctcgccaactggaacagattggcacatgggagcagtactcagaaccattgttcaccctgatcgaatcgattccggaaggtaagaaagtcattctggtaggagaatccggtggcggcatcaatattgcactggccgcggagaaatatccggagaaagtgagcgccctcgtctttcacaacgcacttatgcccgatatcgatcacagtccagcgttcgtgtacaagaaatttagcgaagttttcactgactggaaagattcgatcttcagcaattatacctacggtaacgacacggttaccgcggtggaattgggagatcgtactctggccgagaacatcttctccaattctccgattgaagatgtagaactggcgaaacatctggtccgcaaaggctccttctttgagcaagacttggataccctgccgaactttacgtcggaagggtatggttcaattcgtcgtgtgtatgtttacggcgaagaagaccagatctttagccgcgattttcagttatggcaaattaataattataagcctgataaagtgtactgtgtaccgagtgctgaccacaagattcagatcagcaaagtcaacgagctggcccagattctccaagaagttgcaaactctgcgagtgatcttcttgcagtggct

SEQ ID NO: 544 - protein, 263 aa, synthetic construct
  REGION 1..263: note = Round 2 (Activity)
MVSAHFILIHSICHGAWLWYKLIPLLQSAGHNATAIDLWASGIDPRQLEQIGTWEQYSEPLFTLIESIPEGKKVILVGESGGGINIALAAEKYPEKVSALVFHNALMPDIDHSPAFVYKKFSEVFTDWKDSIFSNYTYGNDTVTAVELGDRTLAENIFSNSPIEDVELAKHLVRKGSFFEQDLDTLPNFTSEGYGSIRRVYVYGEEDQIFSRDFQLWQINNYKPDKVYCVPSADHKIQISKVNELAQILQEVANSASDLLAVA

SEQ ID NO: 545 - DNA, 789 bp, synthetic construct
  misc_feature 1..789: note = Round 2 (Activity)
  source 1..789: mol_type = other DNA
atggttagtgcgcattttattctgatccacagtatttgccatggcgcctggctgtggtataaactgatcccgttattacagtctgcaggtcataacgctacggcgattgatcttgtggctagcgggatcgaccctcgccaactggaacagattggcacatgggagcagtactcagaaccattgttcaccctgatcgaatcgattccggaaggtaagaaagtcattctggtaggagaatccggtggcggcatcaatattgcactggccgcggagaaatatccggagaaagtgagcgccctcgtctttcacaacgcacttatgcccgatatcgatcacagtccagcgttcgtgtacaagaaatttagcgaagttttcactgactggaaagattcgatcttcagcaattatacctacggtaacgacacggttaccgcggtggaattgggagatcgtactctggccgagaacatcttctccaattctccgattgaagatgtagaactggcgaaacatctggtccgccctggctccttctttgagcaagacttggataccctgccgaactttacgtcggaagggtatggttcaattcgtcgtgtgtatgtttacggcgaagaagaccagatctttagccgcgattttcagttatggcaaattaataattataagcctgataaagtgtactgtgtaccgagtgctgaccacaagattcagatcagcaaagtcaacgagctggcccagattctccaagaagttgcaaactctgcgagtgatcttcttgcagtggct

SEQ ID NO: 546 - protein, 263 aa, synthetic construct
  REGION 1..263: note = Round 2 (Activity)
MVSAHFILIHSICHGAWLWYKLIPLLQSAGHNATAIDLVASGIDPRQLEQIGTWEQYSEPLFTLIESIPEGKKVILVGESGGGINIALAAEKYPEKVSALVFHNALMPDIDHSPAFVYKKFSEVFTDWKDSIFSNYTYGNDTVTAVELGDRTLAENIFSNSPIEDVELAKHLVRPGSFFEQDLDTLPNFTSEGYGSIRRVYVYGEEDQIFSRDFQLWQINNYKPDKVYCVPSADHKIQISKVNELAQILQEVANSASDLLAVA

SEQ ID NO: 547 - DNA, 789 bp, synthetic construct
  misc_feature 1..789: note = Round 2 (Activity)
  source 1..789: mol_type = other DNA
atggttagtgcgcattttattctgatccacagtatttgccatggcgcctggatctggtataaactgatcccgttattacagtctgcaggtcataacgttacggcgattgatctttgggctagcgggatcgaccctcgccaactggaacagattggcacatgggagcagtactcagaaccattgttcaccctgatcgaatcgattccggaaggtaagaaagtcattctggtaggagaatccggtggcggcatcaatattgcactggccgcggagaaatatccggagaaagtgagcgccctcgtctttcacaacgcacttatgcccgatatcgatcacagtccagcgttcgtgtacaagaaatttagcgaagttttcactgactggaaagattcgatcttcagcaattatacctacggtaacgacacggttaccgcggtggaattgggagatcgtactctggccgagaacatcttctccaattctccgattgaagatgtagaactggcgaaacatctggtccgcaagggctccttctttgagcaagacttggataccctgccgaactttacgtcggaagggtatggttcaattcgtcgtgtgtatgtttacggcgaagaagaccagatctttagccgcgattttcagttatggcaaattaataattataagcctgataaagtgtactgtatcccgagtgctgaccacaagattcagatcagcaaagtcaacgagctggcccagattctccaagaagttgcaaactctgcgagtgatcttcttgcagtggct

SEQ ID NO: 548 - protein, 263 aa, synthetic construct
  REGION 1..263: note = Round 2 (Activity)
MVSAHFILIHSICHGAWIWYKLIPLLQSAGHNVTAIDLWASGIDPRQLEQIGTWEQYSEPLFTLIESIPEGKKVILVGESGGGINIALAAEKYPEKVSALVFHNALMPDIDHSPAFVYKKFSEVFTDWKDSIFSNYTYGNDTVTAVELGDRTLAENIFSNSPIEDVELAKHLVRKGSFFEQDLDTLPNFTSEGYGSIRRVYVYGEEDQIFSRDFQLWQINNYKPDKVYCIPSADHKIQISKVNELAQILQEVANSASDLLAVA

SEQ ID NO: 549 - DNA, 789 bp, synthetic construct
  misc_feature 1..789: note = Round 2 (Activity)
  source 1..789: mol_type = other DNA
atggttagtgcgcattttattctgatccacagtatttgccatggcgcctggctctggtataaactgatcccgttattacagtctgcaggtcataacgctacggcgattgatctttgggctagcgggatcgaccctcgccaactggaacagattggcacatgggagcagtactcagaaccattgttcaccctgatcgaatcgattccggaaggtaagaaagtcattctggtaggagaatccggtggcggcatcaatattgcactggccgcggagaaatatccggagaaagtgagcgccctcgtctttatgaacgcacttatgcccgatatcgatcacagtccagcgttcgtgtacaagaaatttagcgaagttttcactgactggaaagattcgatcttcagcaattatacctacggtaacgacacggttaccgcggtggaattgggaccacgtactctggccgagaacatcttctccaattctccgattgaagatgtagaactggcgaaacatctggtccgcaaaggctccttctttgagcaagacttggataccctgccgaactttacgtcggaagggtatggttcaattcgtcgtgtgtatgtttacggcgaagaagaccagatctttagccgcgattttcagttatggcaaattaataattataagcctgataaagtgtactgtgtaccgagtgctgaccacaagattcagatcagcaaagtcaacgagctggcccagattctccaagaagttgcaaactctgcgagtgatcttcttgcagtggct

SEQ ID NO: 550 - protein, 263 aa, synthetic construct
  REGION 1..263: note = Round 2 (Activity)
MVSAHFILIHSICHGAWLWYKLIPLLQSAGHNATAIDLWASGIDPRQLEQIGTWEQYSEPLFTLIESIPEGKKVILVGESGGGINIALAAEKYPEKVSALVFMNALMPDIDHSPAFVYKKFSEVFTDWKDSIFSNYTYGNDTVTAVELGPRTLAENIFSNSPIEDVELAKHLVRKGSFFEQDLDTLPNFTSEGYGSIRRVYVYGEEDQIFSRDFQLWQINNYKPDKVYCVPSADHKIQISKVNELAQILQEVANSASDLLAVA

SEQ ID NO: 551 - DNA, 789 bp, synthetic construct
  misc_feature 1..789: note = Round 2 (Activity)
  source 1..789: mol_type = other DNA
atggttagtgcgcattttattctgatccacagtatttgccatggcgcctggctctggtataaactgatcccgttattacagtctgcaggtcataacgctacggcgattgatctttgggctagcgggatcgaccctcgccaactggaacagattggcacatgggagcagtactcagaaccattgttcaccctgatcgaatcgattccggaaggtaagaaagtcattctggtaggagaatccggtggcggcatcaatattgcactggccgcggagaaatatccggagaaagtgagcgccctcgtctttagtaacgcacttatgcccgatatcgatcacagtccagcgttcgtgtacaagaaatttagcgaagttcgtactgactggaaagattcgatcttcagcaattatacctacggtaacgacacggttaccgcggtggaattgggagaccgtactctggccgagaacatcttctccaattctccgattgaagatgtagaactggcgaaacatctggtccgcaaaggctccttctttgagcaagacttggataccctgccgaactttacgtcggaagggtatggttcaattcgtcgtgtgtatgtttacggcgaagaagaccagatttttagccgcgattttcagttatggcaaattaataattataagcctgataaagtgtactgtgtaccgagtgctgaccacaagattcagatcagcaaagtcaacgagctggcccagattctccaagaagttgcaaactctgcgagtgatcttcttgcagtggct

SEQ ID NO: 552 - protein, 263 aa, synthetic construct
  REGION 1..263: note = Round 2 (Activity)
MVSAHFILIHSICHGAWLWYKLIPLLQSAGHNATAIDLWASGIDPRQLEQIGTWEQYSEPLFTLIESIPEGKKVILVGESGGGINIALAAEKYPEKVSALVFSNALMPDIDHSPAFVYKKFSEVRTDWKDSIFSNYTYGNDTVTAVELGDRTLAENIFSNSPIEDVELAKHLVRKGSFFEQDLDTLPNFTSEGYGSIRRVYVYGEEDQIFSRDFQLWQINNYKPDKVYCVPSADHKIQISKVNELAQILQEVANSASDLLAVA

SEQ ID NO: 553 - DNA, 789 bp, synthetic construct
  misc_feature 1..789: note = Round 2 (Activity)
  source 1..789: mol_type = other DNA
atggttagtgcgcattttattctgatccacagtatttgccatggcgcctggctgtggtataaactgatcccgttattacagtctgcaggtcataacgctacggcgattgatcttgtggctagcgggatcgaccctcgccaactggaacagattggcacatgggagcagtactcagaaccattgttcaccctgatcgaatcgattccggaaggtaagaaagtcattctggtaggagaatccggtggcggcatcaatattgcactggccgcggagaaatatccggagaaagtgagcgccctcgtctttcacaacgcacttatgcccgatatcgatcacagtccagcgttcgtgtacaagaaatttagcgaagttttcactgactggaaagattcgatcttcagcaattatacctacggtaacgacacggttaccgcggtggaattgggagatcgtactctggccgagaacatcttctccaattctccgattgaagatgtagaactggcgaaacatctggtccgcaaaggctccttctttgagcaagacttggataccctgccgaactttacgtcggaagggtatggttcaattcgtcgtgtgtatgtttacggcgaagaagaccagatcatgagccgcgattttcagttatggcaaattaataattataagcctgataaagtgtactgtgtcccgagtgctgaccacaagattcagatcagcaaagtcaacgagctggcccagattctccaagaagttgcaaactctgcgagtgatcttcttgcagtggct

SEQ ID NO: 554 - protein, 263 aa, synthetic construct
  REGION 1..263: note = Round 2 (Activity)
MVSAHFILIHSICHGAWLWYKLIPLLQSAGHNATAIDLVASGIDPRQLEQIGTWEQYSEPLFTLIESIPEGKKVILVGESGGGINIALAAEKYPEKVSALVFHNALMPDIDHSPAFVYKKFSEVFTDWKDSIFSNYTYGNDTVTAVELGDRTLAENIFSNSPIEDVELAKHLVRKGSFFEQDLDTLPNFTSEGYGSIRRVYVYGEEDQIMSRDFQLWQINNYKPDKVYCVPSADHKIQISKVNELAQILQEVANSASDLLAVA

SEQ ID NO: 555 - DNA, 789 bp, synthetic construct
  misc_feature 1..789: note = Round 2 (Activity)
  source 1..789: mol_type = other DNA
atggttagtgcgcattttattctgatccacagtatttgccatggcgcctggctgtggtataaactgatcccgttattacagtctgcaggtcataacgttacggcgattgatcttgtggctagcgggatcgaccctcgccaactggaacagattggcacatgggagcagtactcagaaccattgttcaccctgatcgaatcgattccggaaggtaagaaagtcattctggtaggagaatccggtggcggcatcaatattgcactggccgcggagaaatatccggagaaagtgagcgccctcgtctttcacaacgcacttatgcccgatatcgatcacagtccagcgttcgtgctgaagaaatggagcgaagttttcactgactggaaagattcgatcttcagcaattatacctacggtaacgacacggttaccgcggtggaattgggagatcgtactctggccgagaacatcttctccaattctccgattgaagatgtagaactggcgaaacatctggtccgccctggctccttctttgagcaagacttggataccctgccgaactttacgtcggaagggtatggttcaattcgtcgtgtgtatgtttacggcgaagaagaccagatctttagccgcgattttcagttatggcaaattaataattataagcctgataaagtgtactgtgtaccgagtgctgaccacaagattcagatcagcaaagtcaacgagctggcccagattctccaagaagttgcaaactctgcgagtgatcttcttgcagtggct

SEQ ID NO: 556 - protein, 263 aa, synthetic construct
  REGION 1..263: note = Round 2 (Activity)
MVSAHFILIHSICHGAWLWYKLIPLLQSAGHNVTAIDLVASGIDPRQLEQIGTWEQYSEPLFTLIESIPEGKKVILVGESGGGINIALAAEKYPEKVSALVFHNALMPDIDHSPAFVLKKWSEVFTDWKDSIFSNYTYGNDTVTAVELGDRTLAENIFSNSPIEDVELAKHLVRPGSFFEQDLDTLPNFTSEGYGSIRRVYVYGEEDQIFSRDFQLWQINNYKPDKVYCVPSADHKIQISKVNELAQILQEVANSASDLLAVA

SEQ ID NO: 557 - DNA, 789 bp, synthetic construct
  misc_feature 1..789: note = Round 2 (Activity)
  source 1..789: mol_type = other DNA
atggttagtgcgcattttattctgatccacagtatttgccatggcgcctggctctggtataaactgatcccgttattacagtctgcaggtcataacgctacggcgattgatcttgtggctagcgggatcgaccctcgccaactggaacagattggcacatgggagcagtactcagaaccattgttcaccctgatcgaatcgattccggaaggtaagaaagtcattctggtaggagaatccggtggcggcatcaatattgcactggccgcggagaaatatccggagaaagtgagcgccctcgtctttatgaacgcacttatgcccgatatcgatcacagtccagcgttcgtgtacaagaaatttagcgaagttttcactgactggaaagattcgatcttcagcaattatacctacggtaacgacacggttaccgcggtggaattgggagatcgtactctggccgagaacatcttctccaattctccgattgaagatgtagaactggcgaaacatctggtccgcaaaggctccttctttgagcaagacttggataccctgccgaactttacgtcggaagggtatggttcaattcgtcgtgtgtatgtttacggcgaagaagaccagatctttagccgcgattttcagttatggcaaattaataattataagcctgataaagtgtactgtgtaccgagtgctgaccacaagattcagatcagcaaagtcaacgagctggcccagattctccaagaagttgcaaactctgcgagtgatcttcttgcagtggct

SEQ ID NO: 558 - protein, 263 aa, synthetic construct
  REGION 1..263: note = Round 2 (Activity)
MVSAHFILIHSICHGAWLWYKLIPLLQSAGHNATAIDLVASGIDPRQLEQIGTWEQYSEPLFTLIESIPEGKKVILVGESGGGINIALAAEKYPEKVSALVFMNALMPDIDHSPAFVYKKFSEVFTDWKDSIFSNYTYGNDTVTAVELGDRTLAENIFSNSPIEDVELAKHLVRKGSFFEQDLDTLPNFTSEGYGSIRRVYVYGEEDQIFSRDFQLWQINNYKPDKVYCVPSADHKIQISKVNELAQILQEVANSASDLLAVA

SEQ ID NO: 559 - DNA, 789 bp, synthetic construct
  misc_feature 1..789: note = Round 2 (Activity)
  source 1..789: mol_type = other DNA
atggttagtgcgcattttattctgatccacagtatttgccatggcgcctggatctggtataaactgatcccgttattacagtctgcaggtcataacgctacggcgattgatcttgtggctagcgggatcgaccctcgccaactggaacagattggcacatgggagcagtactcagaaccattgttcaccctgatcgaatcgattccggaaggtaagaaagtcattctggtaggagaatccggtggcggcatcaatattgcactggccgcggagaaatatccggagaaagtgagcgccctcgtctttcacaacgcacttatgcccgatatcgatcacagtccagcgttcgtgtacaagaaatttagcgaagttttcactgactggaaagattcgatcttcagcaattatacctacggtaacgacacggttaccgcggtggaattgggagatcgtactctggccgagaacatcttctccaattctccgattgaagatgtagaactggcgaaacatctggtccgccctggctccttctttgagcaagacttggataccctgccgaactttacgtcggaagggtatggttcaattcgtcgtgtgtatgtttacggcgaagaagaccagatctttagccgcgattttcagttatggcaaattaataattataagcctgataaagtgtactgtgtaccgagtgctgaccacaagattcagatcagcaaagtcaacgagctggcccagattctccaagaagttgcaaactctgcgagtgatcttcttgcagtggct

SEQ ID NO: 560 - protein, 263 aa, synthetic construct
  REGION 1..263: note = Round 2 (Activity)
MVSAHFILIHSICHGAWIWYKLIPLLQSAGHNATAIDLVASGIDPRQLEQIGTWEQYSEPLFTLIESIPEGKKVILVGESGGGINIALAAEKYPEKVSALVFHNALMPDIDHSPAFVYKKFSEVFTDWKDSIFSNYTYGNDTVTAVELGDRTLAENIFSNSPIEDVELAKHLVRPGSFFEQDLDTLPNFTSEGYGSIRRVYVYGEEDQIFSRDFQLWQINNYKPDKVYCVPSADHKIQISKVNELAQILQEVANSASDLLAVA

SEQ ID NO: 561 - DNA, 789 bp, synthetic construct
  misc_feature 1..789: note = Round 2 (Selectivity)
  source 1..789: mol_type = other DNA
atggttagtgcgcattttattctgatccacagtatttgccatggcgcctggctctggtataaactgatcccgttattacagtctgcaggtcataacgctacggcgattgatcttgtggctagcgggcaggaccctcgccaactggaacagattggcacatgggagcagtactcagaaccattgttcaccctgatcgaatcgattccggaaggtaagaaagtcattctggtaggagaatccggtggcggcatcaatattgcactggccgcggagaaatatccggagaaagtgagcgccctcgtctttcacaacgcacttatgcccgatatcgatcacagtccagcgttcgtgtacaagaaatttagcgaagttttcactgactggaaagattcgatcttcagcaattatacctacggtaacgacacggttaccgcggtggaattgggagatcgtactctggccgagaacatcttctccaattctccgattgaagatgtagaactggcgaaacatctggtccgcaaaggctccttctttgagcaagacttggataccctgccgaactttacgtcggaagggtatggttcaattcgtcgtgtgtatgtttacggcgaagaagaccagatctttagccgcgattttcagttatggcaaattaataattataagcctgataaagtgtactgtgtaccgagtgctgaccacaagattcagatcagcaaagtcaacgagctggcccagattctccaagaagttgcaaactctgcgagtgatcttcttgcagtggct

SEQ ID NO: 562 - protein, 263 aa, synthetic construct
  REGION 1..263: note = Round 2 (Selectivity)
MVSAHFILIHSICHGAWLWYKLIPLLQSAGHNATAIDLVASGQDPRQLEQIGTWEQYSEPLFTLIESIPEGKKVILVGESGGGINIALAAEKYPEKVSALVFHNALMPDIDHSPAFVYKKFSEVFTDWKDSIFSNYTYGNDTVTAVELGDRTLAENIFSNSPIEDVELAKHLVRKGSFFEQDLDTLPNFTSEGYGSIRRVYVYGEEDQIFSRDFQLWQINNYKPDKVYCVPSADHKIQISKVNELAQILQEVANSASDLLAVA

SEQ ID NO: 563 - DNA, 789 bp, synthetic construct
  misc_feature 1..789: note = Round 2 (Activity)
  source 1..789: mol_type = other DNA
atggttagtgcgcattttattctgatccacagtatttgccatggcgcctggctctggtataaactgatcccgttattacagtctgcaggtcataacgttacggcgattgatctttgggctagcgggatcaaccctcgccaactggaacagattggcacatgggagcagtactcagaaccattgttcaccctgatcgaatcgattccggaaggtaagaaagtcattctggtaggagaatccggtggcggcatcaatattgcactggccgcggagaaatatccggagaaagtgagcgccctcgtctttcacaacgcacttatgcccgatatcgatcacagtccagcgttcgtgtacaagaaatttagcgaagttttcactgactggaaagattcgatcttcagcaattatacctacggtaacgacacggttaccgcggtggaattgggagatcgtactctggccgagaacatcttctccaattctccgattgaagatgtagaactggcgaaacatctggtccgccctggctccttctttgagcaagacttggataccctgccgaactttacgtcggaagggtatggttcaatccgtcgtgtgtatgtttacggcgaagaagaccagatctttagccgcgattttcagttatggcaaattaataattataagcctgataaagtgtactgtgtaccgagtgctgaccacaagattcagatcagcaaagtcaacgagctggcccagattctccaagaagttgcaaactctgcgagtgatcttcttgcagtggct

SEQ ID NO: 564 - protein, 263 aa, synthetic construct
  REGION 1..263: note = Round 2 (Activity)
MVSAHFILIHSICHGAWLWYKLIPLLQSAGHNVTAIDLWASGINPRQLEQIGTWEQYSEPLFTLIESIPEGKKVILVGESGGGINIALAAEKYPEKVSALVFHNALMPDIDHSPAFVYKKFSEVFTDWKDSIFSNYTYGNDTVTAVELGDRTLAENIFSNSPIEDVELAKHLVRPGSFFEQDLDTLPNFTSEGYGSIRRVYVYGEEDQIFSRDFQLWQINNYKPDKVYCVPSADHKIQISKVNELAQILQEVANSASDLLAVA

SEQ ID NO: 565 - DNA, 789 bp, synthetic construct
  misc_feature 1..789: note = Round 2 (Activity)
  source 1..789: mol_type = other DNA
atggttagtgcgcattttattctgatccacagtatttgccatggcgcctggctctggtataaactgatcccgttattacagtctgcaggtcataacgctacggcgattgatctttgggctagcgggatcgaccctcgccaactggaacagattggcacatgggagcagtactcagaaccattgttcaccctgatcgaatcgattccggaaggtaagaaagtcattctggtaggagaatccggtggcggcatcaatattgcactggccgcggagaaatatccggagaaagtgagcgccctcgtctttatgaacgcacttatgcccgatatcgatcacagtccagcgttcgtgtacaagaaatttagcgaagttcgtactgactggaaagattcgatcttcagcaattatacctacggtaacgacacggttaccgcgctggaattgggagaccgtactctggccgagaacatcttctccaattctccgattgaagatgtagaactggcgaaacatctggtccgcaaaggctccttctttgagcaagacttggataccctgccgaactttacgtcggaagggtatggttcaattcgtcgtgtgtatgtttacggcgaagaagaccagatttttagccgcgattttcagttatggcaaattaataattataagcctgataaagtgtactgtgtaccgagtgctgaccacaagattcagatcagcaaagtcaacgagctggcccagattctccaagaagttgcaaactctgcgagtgatcttcttgcagtggct

SEQ ID NO: 566 - protein, 263 aa, synthetic construct
  REGION 1..263: note = Round 2 (Activity)
MVSAHFILIHSICHGAWLWYKLIPLLQSAGHNATAIDLWASGIDPRQLEQIGTWEQYSEPLFTLIESIPEGKKVILVGESGGGINIALAAEKYPEKVSALVFMNALMPDIDHSPAFVYKKFSEVRTDWKDSIFSNYTYGNDTVTALELGDRTLAENIFSNSPIEDVELAKHLVRKGSFFEQDLDTLPNFTSEGYGSIRRVYVYGEEDQIFSRDFQLWQINNYKPDKVYCVPSADHKIQISKVNELAQILQEVANSASDLLAVA

SEQ ID NO: 567 - DNA, 789 bp, synthetic construct
  misc_feature 1..789: note = Round 2 (Activity)
  source 1..789: mol_type = other DNA
atggttagtgcgcattttattctgatccacagtatttgccatggcgcctggctctggtataaactgatcccgttattacagtctgcaggtcataacgctacggcgattgatctttgggctagcgggatcgaccctcgccaactggaacagattggcacatgggagcagtactcagaaccattgttcaccctgatcgaatcgattccggaaggtaagaaagtcattctggtaggagaatccggtggcggcatcaatattgcactggccgcggagaaatatccggagaaagtgagcgccctcgtctttagtaacgcacttatgcccgatatcgatcacagtccagcgttcgtgtacaagaaatttagcgaagttcgtactggctggaaagattcgatcttcagcaattatacctacggtaacgacacggttaccgcgctggaattgggagaccgtactctggccgagaacatcttctccaattctccgattgaagatgtagaactggcgaaacatctggtccgcaaaggctccttctttgagcaagacttggataccctgccgaactttacgtcggaagggtatggttcaattcgtcgtgtgtatgtttacggcgaagaagaccagatttttagccgcgattttcagttatggcaaattaataattataagcctgataaagtgtactgtgtaccgagtgctgaccacaagattcagatcagcaaagtcaacgagctggcccagattctccaagaagttgcaaactctgcgagtgatcttcttgcagtggct

SEQ ID NO: 568 - protein, 263 aa, synthetic construct
  REGION 1..263: note = Round 2 (Activity)
MVSAHFILIHSICHGAWLWYKLIPLLQSAGHNATAIDLWASGIDPRQLEQIGTWEQYSEPLFTLIESIPEGKKVILVGESGGGINIALAAEKYPEKVSALVFSNALMPDIDHSPAFVYKKFSEVRTGWKDSIFSNYTYGNDTVTALELGDRTLAENIFSNSPIEDVELAKHLVRKGSFFEQDLDTLPNFTSEGYGSIRRVYVYGEEDQIFSRDFQLWQINNYKPDKVYCVPSADHKIQISKVNELAQILQEVANSASDLLAVA

SEQ ID NO: 569 - DNA, 789 bp, synthetic construct
  misc_feature 1..789: note = Round 2 (Activity)
  source 1..789: mol_type = other DNA
atggttagtgcgcattttattctgatccacagtatttgccatggcgcctggctctggtataaactgatcccgttattacagtctgcaggtcataacgctacggcgattgatctttgggctagcgggatcgaccctcgccaactggaacagattggcacatgggagcagtactcagaaccattgttcaccctgatcgaatcgattccggaaggtaagaaagtcattctggtaggagaatccggtggcggcatcaatattgcactggccgcggagaaatatccggagaaagtgagcgccctcgtctttatgaacgcacttatgcccgatatcgatcacagtccagcgttcgtgtacaagaaatttagcgaagttttcactgactggaaagattcgatcttcagcaattatacctacggtaacgacacggttaccgcggtggaattgggagaccgtactctggccgagaacatcttctccaattctccgattgaagatgtagaactggcgaaacatctggtccgcaaaggctccttctttgagcaagacttggataccctgccgaactttacgtcggaagggtatggttcaattcgtcgtgtgtatgtttacggcgaagaagaccagatttttagccgcgattttcagttatggcaaattaataattataagcctgataaagtgtactgtgtaccgagtgctgaccacaagattcagatcagcaaagtcaacgagctggcccagattctccaagaagttgcaaactctgcgagtgatcttcttgcagtggct

SEQ ID NO: 570 - protein, 263 aa, synthetic construct
  REGION 1..263: note = Round 2 (Activity)
MVSAHFILIHSICHGAWLWYKLIPLLQSAGHNATAIDLWASGIDPRQLEQIGTWEQYSEPLFTLIESIPEGKKVILVGESGGGINIALAAEKYPEKVSALVFMNALMPDIDHSPAFVYKKFSEVFTDWKDSIFSNYTYGNDTVTAVELGDRTLAENIFSNSPIEDVELAKHLVRKGSFFEQDLDTLPNFTSEGYGSIRRVYVYGEEDQIFSRDFQLWQINNYKPDKVYCVPSADHKIQISKVNELAQILQEVANSASDLLAVA

SEQ ID NO: 571 - DNA, 789 bp, synthetic construct
  misc_feature 1..789: note = Round 2 (Activity)
  source 1..789: mol_type = other DNA
atggttagtgcgcattttattctgatccacagtatttgccatggcgcctggctgtggtataaactgatcccgttattacagtctgcaggtcataacgctacggcgattgatcttgtggctagcgggatcgaccctcgccaactggaacagattggcacatgggagcagtactcagaaccattgttcaccctgatcgaatcgattccggaaggtaagaaagtcattctggtaggagaatccggtggcggcatcaatattgcactggccgcggagaaatatccggagaaagtgagcgccctcgtctttcacaacgcacttatgcccgatatcgatcacagtccagcgttcgtgtacaagaaatttagcgaagttttcactgactggaaagattcgatcttcagcaattatacctacggtaacgacacggttaccgcggtggaattgggagatcgtgctctggccgagaacatcttctccaattctccgattgaagatgtagaactggcgaaacatctggtccgcaagggctccttctttgagcaagacttggataccctgccgaactttacgtcggaagggtatggttcagtccgtcgtgtgtatgtttacggcgaagaagaccagatctttagccgcgattttcagttatggcaaattaataattataagcctgataaagtgtactgtgtaccgagtgctgaccacaagattcagatcagcaaagtcaacgagctggcccagattctccaagaagttgcaaactctgcgagtgatcttcttgcagtggct

SEQ ID NO: 572 - protein, 263 aa, synthetic construct
  REGION 1..263: note = Round 2 (Activity)
MVSAHFILIHSICHGAWLWYKLIPLLQSAGHNATAIDLVASGIDPRQLEQIGTWEQYSEPLFTLIESIPEGKKVILVGESGGGINIALAAEKYPEKVSALVFHNALMPDIDHSPAFVYKKFSEVFTDWKDSIFSNYTYGNDTVTAVELGDRALAENIFSNSPIEDVELAKHLVRKGSFFEQDLDTLPNFTSEGYGSVRRVYVYGEEDQIFSRDFQLWQINNYKPDKVYCVPSADHKIQISKVNELAQILQEVANSASDLLAVA

SEQ ID NO: 573 - DNA, 789 bp, synthetic construct
  misc_feature 1..789: note = Round 2 (Activity)
  source 1..789: mol_type = other DNA
atggttagtgcgcattttattctgatccacagtatttgccatggcgcctggctctggtataaactgatcccgttattacagtctgcaggtcataacgctacggcgattgatcttgtggctagcgggatcgaccctcgccaactggaacagattggcacatgggagcagtactcagaaccattgttcaccctgatcgaatcgattccggaaggtaagaaagtcattctggtaggagaatccggtggcggcatcaatattgcactggccgcggagaaatatccggagaaagtgagcgccctcgtctttcacaacgcacttatgcccgatatcgatcacagtccagcgttcgtgtacaagaaatttagcgaagttttcactgactggaaagattcgatcttcagcaattatacctacggtaacgacacggttaccgcggtggaattgggagatcgtactctgattgagaacatcttctccaattctccgattgaagatgtagaactggcgaaacatctggtccgcaaaggctccttctttgagcaagacttggataccctgccgaactttacgtcggaagggtatggttcaattcgtcgtgtgtatgtttacggcgaagaagaccagatctttagccgcgattttcagttatggcaaattaataattataagcctgataaagtgtactgtgtaccgagtgctgaccacaagattcagatcagcaaagtcaacgagctggcccagattctccaagaagttgcaaactctgcgagtgatcttcttgcagtggct

SEQ ID NO: 574 - protein, 263 aa, synthetic construct
  REGION 1..263: note = Round 2 (Activity)
MVSAHFILIHSICHGAWLWYKLIPLLQSAGHNATAIDLVASGIDPRQLEQIGTWEQYSEPLFTLIESIPEGKKVILVGESGGGINIALAAEKYPEKVSALVFHNALMPDIDHSPAFVYKKFSEVFTDWKDSIFSNYTYGNDTVTAVELGDRTLIENIFSNSPIEDVELAKHLVRKGSFFEQDLDTLPNFTSEGYGSIRRVYVYGEEDQIFSRDFQLWQINNYKPDKVYCVPSADHKIQISKVNELAQILQEVANSASDLLAVA

SEQ ID NO: 575 - DNA, 789 bp, synthetic construct
  misc_feature 1..789: note = Round 2 (Selectivity)
  source 1..789: mol_type = other DNA
atggttagtgcgcattttattctgatccacagtatttgccatggcgcctggctgtggtataaactgatcccgttattacagtctgcaggtcataacgctacggcgattgatctttgggctagcgggatcgaccctcgccaactggaacagattggcacatgggagcagtactcagaaccattgttcaccctgatcgaatcgattccggaaggtaagaaagtcattctggtaggagaatccggtggcggcatcaatattgcactggccgcggagaaatatccggagaaagtgagcgccctcgtctttcacaacgcacttatgcccgatatcgatcacagtccagcgttcgtgctgaagaaatatagcgaagttttcactgactggaaagattcgatcttcagcaattatacctacggtaacgacacggttaccgcggtggaattgggagatcgtactctggccgagaacatcttctccaattctccgattgaagatgtagaactggcgaaacatctggtccgcaaaggctccttctttgagcaagacttggataccctgccgaactttacgtcggaagggtatggttcaattcgtcgtgtgtatgtttacggcgaagaagaccagatctttagccgcgattttcagttatggcaaattaataattataagcctgataaagtgtactgtgtcccgagtgctgaccacaagattcagatcagcaaagtcaacgagctggcccagattctccaagaagttgcaaactctgcgagtgatcttcttgcagtggct

SEQ ID NO: 576 - protein, 263 aa, synthetic construct
  REGION 1..263: note = Round 2 (Selectivity)
MVSAHFILIHSICHGAWLWYKLIPLLQSAGHNATAIDLWASGIDPRQLEQIGTWEQYSEPLFTLIESIPEGKKVILVGESGGGINIALAAEKYPEKVSALVFHNALMPDIDHSPAFVLKKYSEVFTDWKDSIFSNYTYGNDTVTAVELGDRTLAENIFSNSPIEDVELAKHLVRKGSFFEQDLDTLPNFTSEGYGSIRRVYVYGEEDQIFSRDFQLWQINNYKPDKVYCVPSADHKIQISKVNELAQILQEVANSASDLLAVA

SEQ ID NO: 577 - DNA, 789 bp, synthetic construct
  misc_feature 1..789: note = Round 2 (Activity)
  source 1..789: mol_type = other DNA
atggttagtgcgcattttattctgatccacagtatttgccatggcgcctggctctggtataaactgatcccgttattacagtctgcaggtcataacgctacggcgattgatcttgtggctagcgggatcgaccctcgccaactggaacagattggcacatgggagcagtactcagaaccattgttcaccctgatcgaatcgattccggaaggtaagaaagtcattctggtaggagaatccggtggcggcatcaatattgcactggccgcggagaaatatccggagaaagtgagcgccctcgtctttagtaacgcacttatgcccgatatcgatcacagtccagcgttcgtgtacaagaaatttagcgaagttcctactggctggaaagattcgatcttcagcaattatacctacggtaacgacacggttaccgcggtggaattgggagaccgtactctggccgagaacatcttctccaattctccgattgaagatgtagaactggcgaaacatctggtccgcaaaggctccttctttgagcaagacttggataccctgccgaactttacgtcggaagggtatggttcaattcgtcgtgtgtatgtttacggcgaagaagaccagatttttagccgcgattttcagttatggcaaattaataattataagcctgataaagtgtactgtgtaccgagtgctgaccacaagattcagatcagcaaagtcaacgagctggcccagattctccaagaagttgcaaactctgcgagtgatcttcttgcagtggct

SEQ ID NO: 578 - protein, 263 aa, synthetic construct
  REGION 1..263: note = Round 2 (Activity)
MVSAHFILIHSICHGAWLWYKLIPLLQSAGHNATAIDLVASGIDPRQLEQIGTWEQYSEPLFTLIESIPEGKKVILVGESGGGINIALAAEKYPEKVSALVFSNALMPDIDHSPAFVYKKFSEVPTGWKDSIFSNYTYGNDTVTAVELGDRTLAENIFSNSPIEDVELAKHLVRKGSFFEQDLDTLPNFTSEGYGSIRRVYVYGEEDQIFSRDFQLWQINNYKPDKVYCVPSADHKIQISKVNELAQILQEVANSASDLLAVA

SEQ ID NO: 579 - DNA, 789 bp, synthetic construct
  misc_feature 1..789: note = Round 2 (Activity)
  source 1..789: mol_type = other DNA
atggttagtgcgcattttattctgatccacagtatttgccatggcgcctggctctggtataaactgatcccgttattacagtctgcaggtcataacgctacggcgattgatctttgggctagcgggatcgaccctcgccaactggaacagattggcacatgggagcagtactcagaaccattgttcaccctgatcgaatcgattccggaaggtaagaaagtcattctggtaggagaatccggtggcggcatcaatattgcactggccgcggagaaatatccggagaaagtgagcgccctcgtctttcaaaacgcacttatgcccgatatcgatcacagtccagcgttcgtgtacaagaaatttagcgaagttttcactgactggaaagattcgatcttcagcaattatacctacggtaacgacacggttaccgcggtggaattgggagatcgtactctggccgagaacatcttctccaattctccgattgaagatgtagaactggcgaaacatctggtccgcaaaggctccttctttgagcaagacttggataccctgccgaactttacgtcggaagggtatggttcaattcgtcgtgtgtatgtttacggcgaagaagaccagatctttagccgcgattttcagttatggcaaattaataattataagcctgataaagtgtactgtgtaccgagtgctgaccacaagattcagatcagcaaagtcaacgagctggcccagattctccaagaagttgcaaactctgcgagtgatcttcttgcagtggct

SEQ ID NO: 580 - protein, 263 aa, synthetic construct
  REGION 1..263: note = Round 2 (Activity)
MVSAHFILIHSICHGAWLWYKLIPLLQSAGHNATAIDLWASGIDPRQLEQIGTWEQYSEPLFTLIESIPEGKKVILVGESGGGINIALAAEKYPEKVSALVFQNALMPDIDHSPAFVYKKFSEVFTDWKDSIFSNYTYGNDTVTAVELGDRTLAENIFSNSPIEDVELAKHLVRKGSFFEQDLDTLPNFTSEGYGSIRRVYVYGEEDQIFSRDFQLWQINNYKPDKVYCVPSADHKIQISKVNELAQILQEVANSASDLLAVA

SEQ ID NO: 581 - DNA, 789 bp, synthetic construct
  misc_feature 1..789: note = Round 2 (Activity)
  source 1..789: mol_type = other DNA
atggttagtgcgcattttattctgatccacagtatttgccatggcgcctggatctggtataaactgatcccgttattacagtctgcaggtcataacgctacggcgattgatcttgtggctagcgggatcgaccctcgccaactggaacagattggcacatgggagcagtactcagaaccattgttcaccctgatcgaatcgattccggaaggtaagaaagtcattctggtaggagaatccggtggcggcatcaatattgcactggccgcggagaaatatccggagaaagtgagcgccctcgtctttcacaacgcacttatgcccgatatcgatcacagtccagcgttcgtgtacaagaaatttagcgaagttttcactgactggaaagattcgatcttcagcaattatacctacggtaacgacacggttaccgcggtggaattgggagatcgtactctggccgagaacatcttctccaattctccgattgaagatgtagaactggcgaaacatctggtccgcaaaggctccttctttgagcaagacttggataccctgccgaactttacgtcggaagggtatggttcaattcgtcgtgtgtatgtttacggcgaagaagaccagatctttagccgcgattttcagttatggcaaattaataattataagcctgataaagtgtactgtgtaccgagtgctgaccacaagattcagatcagcaaagtcaacgagctggcccagattctccaagaagttgcaaactctgcgagtgatcttcttgcagtggct

SEQ ID NO: 582 - protein, 263 aa, synthetic construct
  REGION 1..263: note = Round 2 (Activity)
MVSAHFILIHSICHGAWIWYKLIPLLQSAGHNATAIDLVASGIDPRQLEQIGTWEQYSEPLFTLIESIPEGKKVILVGESGGGINIALAAEKYPEKVSALVFHNALMPDIDHSPAFVYKKFSEVFTDWKDSIFSNYTYGNDTVTAVELGDRTLAENIFSNSPIEDVELAKHLVRKGSFFEQDLDTLPNFTSEGYGSIRRVYVYGEEDQIFSRDFQLWQINNYKPDKVYCVPSADHKIQISKVNELAQILQEVANSASDLLAVA

SEQ ID NO: 583 - DNA, 789 bp, synthetic construct
  misc_feature 1..789: note = Round 2 (Activity)
  source 1..789: mol_type = other DNA
atggttagtgcgcattttattctgatccacagtatttgccatggcgcctggctctggtataaactgatcccgttattacagtctgcaggtcataacgctacggcgattgatctttgggctagcgggatcgaccctcgccaactggaacagattggcacatgggagcagtactcagaaccattgttcaccctgatcgaatcgattccggaaggtaagaaagtcattctggtaggagaatccggtggcggcatcaatattgcactggccgcggagaaatatccggagaaagtgagcgccctcgtctttcacaacgcacttatgcccgatatcgatcacagtccagcgttcgtgtataagaaatttagcgaagttttcactgactggaaagattcgatcttcagcaattatacctacggtaacgacacggttaccgcggtggaattgggagatcgtactctggccgagaacatcttctccaattctccgattgaagatgtagaactggcgaaacatctggtccgcaaaggctccttctttgagcaagacttggataccctgccgaactttacgtcggaagggtatggttcagtccgtcgtgtgtatgtttacggcgaagaagaccagatcatgagccgcgattttcagttatggcaaattaataattataagcctgataaagtgtactgtgtcccgagtgctgaccacaagattcagatcagcaaagtcaacgagctggcccagattctccaagaagttgcaaactctgcgagtgatcttcttgcagtggct

SEQ ID NO: 584 - protein, 263 aa, synthetic construct
  REGION 1..263: note = Round 2 (Activity)
MVSAHFILIHSICHGAWLWYKLIPLLQSAGHNATAIDLWASGIDPRQLEQIGTWEQYSEPLFTLIESIPEGKKVILVGESGGGINIALAAEKYPEKVSALVFHNALMPDIDHSPAFVYKKFSEVFTDWKDSIFSNYTYGNDTVTAVELGDRTLAENIFSNSPIEDVELAKHLVRKGSFFEQDLDTLPNFTSEGYGSVRRVYVYGEEDQIMSRDFQLWQINNYKPDKVYCVPSADHKIQISKVNELAQILQEVANSASDLLAVA

SEQ ID NO: 585 - DNA, 789 bp, synthetic construct
  misc_feature 1..789: note = Round 2 (Activity)
  source 1..789: mol_type = other DNA
atggttagtgcgcattttattctgatccacagtatttgccatggcgcctggctctggtataaactgatcccgttattacagtctgcaggtcataacgctacggcgattgatctttgggctagcgggatcgaccctcgccaactggaacagattggcacatgggagcagtactcagaaccattgttcaccctgatcgaatcgattccggaaggtaagaaagtcattctggtaggagaatccggtggcggcatcaatattgcactggccgcggagaaatatccggagaaagtgagcgccctcgtctttcacaacgcacttatgcccgatatcgatcacagtccagcgttcgtgtataagaaatttagcgaagttttcactgactggaaagattcgatcttcagcaattatacctacggtaacgacacggttaccgcggtggaattgggagatcgtactctggccgagaacatcttctccaattctccgattgaagatgtagaactggcgaaacatctggtccgcaaaggctccttctttgagcaagacttggataccctgccgaactttacgtcggaagggtatggttcagtccgtcgtgtgtatgtttacggcgaagaagaccagatctttagccgcgattttcagttatggcaaattaataattataagcctgataaagtgtactgtgtaccgagtgctgaccacaagattcagatcagcaaagtcaacgagctggcccagattctccaagaagttgcaaactctgcgagtgatcttcttgcagtggct

SEQ ID NO: 586 - protein, 263 aa, synthetic construct
  REGION 1..263: note = Round 2 (Activity)
MVSAHFILIHSICHGAWLWYKLIPLLQSAGHNATAIDLWASGIDPRQLEQIGTWEQYSEPLFTLIESIPEGKKVILVGESGGGINIALAAEKYPEKVSALVFHNALMPDIDHSPAFVYKKFSEVFTDWKDSIFSNYTYGNDTVTAVELGDRTLAENIFSNSPIEDVELAKHLVRKGSFFEQDLDTLPNFTSEGYGSVRRVYVYGEEDQIFSRDFQLWQINNYKPDKVYCVPSADHKIQISKVNELAQILQEVANSASDLLAVA

SEQ ID NO: 587 - DNA, 789 bp, synthetic construct
  misc_feature 1..789: note = Round 2 (Activity)
  source 1..789: mol_type = other DNA
atggttagtgcgcattttattctgatccacagtatttgccatggcgcctggatctggtataaactgatcccgttattacagtctgcaggtcataacgctacggcgattgatctttgggctagcgggatcaaccctcgccaactggaacagattggcacatgggagcagtactcagaaccattgttcaccctgatcgaatcgattccggaaggtaagaaagtcattctggtaggagaatccggtggcggcatcaatattgcactggccgcggagaaatatccggagaaagtgagcgccctcgtctttcacaacgcacttatgcccgatatcgatcacagtccagcgttcgtgctgaagaaatttagcgaagttttcactgactggaaagattcgatcttcagcaattatacctacggtaacgacacggttaccgcggtggaattgggagatcgtactctggccgagaacatcttctccaattctccgattgaagatgtagaactggcgaaacatctggtccgcaaaggctccttctttgagcaagacttggataccctgccgaactttacgtcggaagggtatggttcaattcgtcgtgtgtatgtttacggcgaagaagaccagatctttagccgcgattttcagttatggcaaattaataattataagcctgataaagtgtactgtgtcccgagtgctgaccacaagattcagatcagcaaagtcaacgagctggcccagattctccaagaagttgcaaactctgcgagtgatcttcttgcagtggct

SEQ ID NO: 588 - protein, 263 aa, synthetic construct
  REGION 1..263: note = Round 2 (Activity)
MVSAHFILIHSICHGAWIWYKLIPLLQSAGHNATAIDLWASGINPRQLEQIGTWEQYSEPLFTLIESIPEGKKVILVGESGGGINIALAAEKYPEKVSALVFHNALMPDIDHSPAFVLKKFSEVFTDWKDSIFSNYTYGNDTVTAVELGDRTLAENIFSNSPIEDVELAKHLVRKGSFFEQDLDTLPNFTSEGYGSIRRVYVYGEEDQIFSRDFQLWQINNYKPDKVYCVPSADHKIQISKVNELAQILQEVANSASDLLAVA

SEQ ID NO: 589 - DNA, 789 bp, synthetic construct
  misc_feature 1..789: note = Round 2 (Activity)
  source 1..789: mol_type = other DNA
atggttagtgcgcattttattctgatccacagtatttgccatggcgcctggctctggtataaactgatcccgttattacagtctgcaggtcataacgctacggcgattgatcttgtcgctagcgggatcgaccctcgccaactggaacagattggcacatgggagcagtactcagaaccattgttcaccctgatcgaatcgattccggaaggtaagaaagtcattctggtaggagaatccggtggcggcatcaatattgcactggccgcggagaaatatccggagaaagtgagcgccctcgtctttatgaacgcacttatgcccgatatcgatcacagtccagcgttcgtgtacaagaaatttagcgaagtttttactggctggaaagattcgatcttcagcaattatacctacggtaacgacacggttaccgcggtggaattgggagaccgtactctggccgagaacatcttctccaattctccgattgaagatgtagaactggcgaaacatctggtccgcaaaggctccttctttgagcaagacttggataccctgccgaactttacgtcggaagggtatggttcaattcgtcgtgtgtatgtttacggcgaagaagaccagatttttagccgcgattttcagttatggcaaattaataattataagcctgataaagtgtactgtgtaccgagtgctgaccacaagattcagatcagcaaagtcaacgagctggcccagattctccaagaagttgcaaactctgcgagtgatcttcttgcagtggct

SEQ ID NO: 590 - protein, 263 aa, synthetic construct
  REGION 1..263: note = Round 2 (Activity)
MVSAHFILIHSICHGAWLWYKLIPLLQSAGHNATAIDLVASGIDPRQLEQIGTWEQYSEPLFTLIESIPEGKKVILVGESGGGINIALAAEKYPEKVSALVFMNALMPDIDHSPAFVYKKFSEVFTGWKDSIFSNYTYGNDTVTAVELGDRTLAENIFSNSPIEDVELAKHLVRKGSFFEQDLDTLPNFTSEGYGSIRRVYVYGEEDQIFSRDFQLWQINNYKPDKVYCVPSADHKIQISKVNELAQILQEVANSASDLLAVA

SEQ ID NO: 591 - DNA, 789 bp, synthetic construct
  misc_feature 1..789: note = Round 2 (Activity)
  source 1..789: mol_type = other DNA
atggttagtgcgcattttattctgatccacagtatttgccatggcgcctggctctggtataaactgatcccgttattacagtctgcaggtcataacgctacggcgattgatctttgggctagcgggatcaaccctcgccaactggaacagattggcacatgggagcagtactcagaaccattgttcaccctgatcgaatcgattccggaaggtaagaaagtcattctggtaggagaatccggtggcggcatcaatattgcactggccgcggagaaatatccggagaaagtgagcgccctcgtctttcacaacgcacttatgcccgatatcgatcacagtccagcgttcgtgctgaagaaatttagcgaagttttcactgactggaaagattcgatcttcagcaattatacctacggtaacgacacggttaccgcggtggaattgggagatcgtactctggccgagaacatcttctccaattctccgattgaagatgtagaactggcgaaacatctggtccgcaaaggctccttctttgagcaagacttggataccctgccgaactttacgtcggaagggtatggttcaattcgtcgtgtgtatgtttacggcgaagaagaccagatctttagccgcgattttcagttatggcaaattaataattataagcctgataaagtgtactgtgtcccgagtgctgaccacaagattcagatcagcaaagtcaacgagctggcccagattctccaagaagttgcaaactctgcgagtgatcttcttgcagtggct

SEQ ID NO: 592 - protein, 263 aa, synthetic construct
  REGION 1..263: note = Round 2 (Activity)
MVSAHFILIHSICHGAWLWYKLIPLLQSAGHNATAIDLWASGINPRQLEQIGTWEQYSEPLFTLIESIPEGKKVILVGESGGGINIALAAEKYPEKVSALVFHNALMPDIDHSPAFVLKKFSEVFTDWKDSIFSNYTYGNDTVTAVELGDRTLAENIFSNSPIEDVELAKHLVRKGSFFEQDLDTLPNFTSEGYGSIRRVYVYGEEDQIFSRDFQLWQINNYKPDKVYCVPSADHKIQISKVNELAQILQEVANSASDLLAVA

SEQ ID NO: 593 - DNA, 789 bp, synthetic construct
  misc_feature 1..789: note = Round 2 (Activity)
  source 1..789: mol_type = other DNA
atggttagtgcgcattttattctgatccacagtatttgccatggcgcctggctctggcataaactgatcccgttattacagtctgcaggtcataacgctacggcgattgatcttgtggctagcgggatcgaccctcgccaactggaacagattggcacatgggagcagtactcagaaccattgttcaccctgatcgaatcgattccggaaggtaagaaagtcattctggtaggagaatccggtggcggcatcaatattgcactggccgcggagaaatatccggagaaagtgagcgccctcgtctttcacaacgcacttatgcccgatatcgatcacagtccagcgttcgtgtacaagaaatttagcgaagttttcactgactggaaagattcgatcttcagcaattatacctacggtaacgacacggttaccgcggtggaattgggagatcgtactctggccgagaacatcttctccaattctccgattgaagatgtagaactggcgaaacatctggtccgcaaaggctccttctttgagcaagacttggataccctgccgaactttacgtcggaagggtatggttcaattcgtcgtgtgtatgtttacggcgaagaagaccagatctttagccgcgattttcagttatggcaaattaataattataagcctgataaagtgtactgtgtaccgagtgctgaccacaagattcagatcagcaaagtcaacgagctggcccagattctccaagaagttgcaaactctgcgagtgatcttcttgcagtggct

SEQ ID NO: 594 - protein, 263 aa, synthetic construct
  REGION 1..263: note = Round 2 (Activity)
MVSAHFILIHSICHGAWLWHKLIPLLQSAGHNATAIDLVASGIDPRQLEQIGTWEQYSEPLFTLIESIPEGKKVILVGESGGGINIALAAEKYPEKVSALVFHNALMPDIDHSPAFVYKKFSEVFTDWKDSIFSNYTYGNDTVTAVELGDRTLAENIFSNSPIEDVELAKHLVRKGSFFEQDLDTLPNFTSEGYGSIRRVYVYGEEDQIFSRDFQLWQINNYKPDKVYCVPSADHKIQISKVNELAQILQEVANSASDLLAVA

SEQ ID NO: 595 - DNA, 789 bp, synthetic construct
  misc_feature 1..789: note = Round 2 (Activity)
  source 1..789: mol_type = other DNA
atggttagtgcgcattttattctgatccacagtatttgccatggcgcctggctctggtataaactgatcccgttattacagtctgcaggtcataacgctacggcgattgatcttgtggctagcgggatcgaccctcgccaactggaacagattggcacatgggagcagtactcagaaccattgttcaccctgatcgaatcgattccggaaggtaagaaagtcattctggtaggagaatccggtggcggcatcaatattgcactggccgcggagaaatatccggagaaagtgagcgccctcgtctttcacaacgcacttatgcccgatatcgatcacagtccagcgttcgtgtacaagaaatttagcgaagttttcactgactggaaagattcgatcttcagcaattatacctacggtaacgacacggttaccgcggtggaattgggagatcgtactctggccgagaacatcttctccaattctccgccggaagatgtagaactggcgaaacatctggtccgcaaaggctccttctttgagcaagacttggataccctgccgaactttacgtcggaagggtatggttcaattcgtcgtgtgtatgtttacggcgaagaagaccagatctttagccgcgattttcagttatggcaaattaataattataagcctgataaagtgtactgtgtaccgagtgctgaccacaagattcagatcagcaaagtcaacgagctggcccagattctccaagaagttgcaaactctgcgagtgatcttcttgcagtggct

SEQ ID NO: 596 - protein, 263 aa, synthetic construct
  REGION 1..263: note = Round 2 (Activity)
MVSAHFILIHSICHGAWLWYKLIPLLQSAGHNATAIDLVASGIDPRQLEQIGTWEQYSEPLFTLIESIPEGKKVILVGESGGGINIALAAEKYPEKVSALVFHNALMPDIDHSPAFVYKKFSEVFTDWKDSIFSNYTYGNDTVTAVELGDRTLAENIFSNSPPEDVELAKHLVRKGSFFEQDLDTLPNFTSEGYGSIRRVYVYGEEDQIFSRDFQLWQINNYKPDKVYCVPSADHKIQISKVNELAQILQEVANSASDLLAVA

SEQ ID NO: 597 - DNA, 789 bp, synthetic construct
  misc_feature 1..789: note = Round 2 (Selectivity)
  source 1..789: mol_type = other DNA
atggttagtgcgcattttattctgatccacagtatttgccatggcgcctggctgtggtataaactgatcccgttattacagtctgcaggtcataacgttacggcgattgatcttgtggctagcgggatcgaccctcgccaactggaacagattggcacatgggagcagtactcagaaccattgttcaccctgatcgaatcgattccggaaggtaagaaagtcattctggtaggagaatccggtggcggcatcaatattgcactggccgcggagaaatatccggagaaagtgagcgccctcgtctttcacaacgcacttatgcccgatatcgatcacagtccagcgttcgtgtataagaaatggagcgaagttttcactgactggaaagattcgatcttcagcaattatacctacggtaacgacacggttaccgcggtggaattgggagatcgtactctggccgagaacatcttctccaattctccgattgaagatgtagaactggcgaaacatctggtccgcaagggctccttctttgagcaagacttggataccctgccgaactttacgtcggaagggtatggttcaattcgtcgtgtgtatgtttacggcgaagaagaccagatctttagccgcgattttcagttatggcaaattaataattataagcctgataaagtgtactgtgtaccgagtgctgaccacaagattcagatcagcaaagtcaacgagctggcccagattctccaagaagttgcaaactctgcgagtgatcttcttgcagtggct

SEQ ID NO: 598 - protein, 263 aa, synthetic construct
  REGION 1..263: note = Round 2 (Selectivity)
MVSAHFILIHSICHGAWLWYKLIPLLQSAGHNVTAIDLVASGIDPRQLEQIGTWEQYSEPLFTLIESIPEGKKVILVGESGGGINIALAAEKYPEKVSALVFHNALMPDIDHSPAFVYKKWSEVFTDWKDSIFSNYTYGNDTVTAVELGDRTLAENIFSNSPIEDVELAKHLVRKGSFFEQDLDTLPNFTSEGYGSIRRVYVYGEEDQIFSRDFQLWQINNYKPDKVYCVPSADHKIQISKVNELAQILQEVANSASDLLAVA

SEQ ID NO: 599 - DNA, 789 bp, synthetic construct
  misc_feature 1..789: note = Round 2 (Selectivity)
  source 1..789: mol_type = other DNA
atggttagtgcgcattttattctgatccacagtatttgccatggcgcctggctctggtataaactgatcccgttattacagtctgcaggtcataacgctacggcgattgatcttgtggctagcgggatcgaccctcgccaactggaacagattggcacatgggagcagtactcagaaccattgttcaccctgatcgaatcgattccggaaggtaagaaagtcattctggtaggagaatccggtggcggcatcaatattgcactggccgcggagaaatatccggagaaagtgagcgccctcgtctttcacaacgcacttatgcccgatatcgatcacagtccagcgttcgtgtataagaaatggagcgaagttttcactgactggaaagattcgatcttcagcaattatacctacggtaacgacacggttaccgcggtggaattgggagatcgtactctggccgagaacatcttctccaattctccgattgaagatgtagaactggcgaaacatctggtccgcaaaggctccttctttgagcaagacttggataccctgccgaactttacgtcggaagggtatggttcaattcgtcgtgtgtatgtttacggcgaagaagaccagatctttagccgcgattttcagttatggcaaattaataattataagcctgataaagtgtactgtgtcccgagtgctgaccacaagattcagatcagcaaagtcaacgagctggcccagattctccaagaagttgcaaactctgcgagtgatcttcttgcagtggct

SEQ ID NO: 600 - protein, 263 aa, synthetic construct
  REGION 1..263: note = Round 2 (Selectivity)
MVSAHFILIHSICHGAWLWYKLIPLLQSAGHNATAIDLVASGIDPRQLEQIGTWEQYSEPLFTLIESIPEGKKVILVGESGGGINIALAAEKYPEKVSALVFHNALMPDIDHSPAFVYKKWSEVFTDWKDSIFSNYTYGNDTVTAVELGDRTLAENIFSNSPIEDVELAKHLVRKGSFFEQDLDTLPNFTSEGYGSIRRVYVYGEEDQIFSRDFQLWQINNYKPDKVYCVPSADHKIQISKVNELAQILQEVANSASDLLAVA

SEQ ID NO: 601 - DNA, 789 bp, synthetic construct
  misc_feature 1..789: note = Round 2 (Selectivity)
  source 1..789: mol_type = other DNA
atggttagtgcgcattttattctgatccacagtatttgccatggcgcctggctctggtataaactgatcccgttattacagtctgcaggtcataacgctacggcgattgatcttgtggctagcgggatcgaccctcgccaactggaacagattggcacatgggagcagtactcagaaccattgttcaccctgatcgaatcgattccggaaggtaagaaagtcattctggtaggagaatccggtggcggcatcaatattgcactggccgcggagaaatatccggagaaagtgagcgccctcgtctttcacaacgcacttatgcccgatatcgatcacagtccagcgttcgtgctgaagaaatggagcgaagttttcactgactggaaagattcgatcttcagcaattatacctacggtaacgacacggttaccgcggtggaattgggagatcgtactctggccgagaacatcttctccaattctccgattgaagatgtagaactggcgaaacatctggtccgcaagggctccttctttgagcaagacttggataccctgccgaactttacgtcggaagggtatggttcaattcgtcgtgtgtatgtttacggcgaagaagaccagatctttagccgcgattttcagttatggcaaattaataattataagcctgataaagtgtactgtgtaccgagtgctgaccacaagattcagatcagcaaagtcaacgagctggcccagattctccaagaagttgcaaactctgcgagtgatcttcttgcagtggct

SEQ ID NO: 602 - protein, 263 aa, synthetic construct
  REGION 1..263: note = Round 2 (Selectivity)
MVSAHFILIHSICHGAWLWYKLIPLLQSAGHNATAIDLVASGIDPRQLEQIGTWEQYSEPLFTLIESIPEGKKVILVGESGGGINIALAAEKYPEKVSALVFHNALMPDIDHSPAFVLKKWSEVFTDWKDSIFSNYTYGNDTVTAVELGDRTLAENIFSNSPIEDVELAKHLVRKGSFFEQDLDTLPNFTSEGYGSIRRVYVYGEEDQIFSRDFQLWQINNYKPDKVYCVPSADHKIQISKVNELAQILQEVANSASDLLAVA

SEQ ID NO: 603 - DNA, 789 bp, synthetic construct
  misc_feature 1..789: note = Round 2 (Selectivity)
  source 1..789: mol_type = other DNA
atggttagtgcgcattttattctgatccacagtatttgccatggcgcctggctgtggtataaactgatcccgttattacagtctgcaggtcataacgttacggcgattgatcttgtggctagcgggatcgaccctcgccaactggaacagattggcacatgggagcagtactcagaaccattgttcaccctgatcgaatcgattccggaaggtaagaaagtcattctggtaggagaatccggtggcggcatcaatattgcactggccgcggagaaatatccggagaaagtgagcgccctcgtctttcacaacgcacttatgcccgatatcgatcacagtccagcgttcgtgctgaagaaatggagcgaagttttcactgactggaaagattcgatcttcagcaattatacctacggtaacgacacggttaccgcggtggaattgggagatcgtactctggccgagaacatcttctccaattctccgattgaagatgtagaactggcgaaacatctggtccgcaaaggctccttctttgagcaagacttggataccctgccgaactttacgtcggaagggtatggttcagtccgtcgtgtgtatgtttacggcgaagaagaccagatctttagccgcgattttcagttatggcaaattaataattataagcctgataaagtgtactgtgtcccgagtgctgaccacaagattcagatcagcaaagtcaacgagctggcccagattctccaagaagttgcaaactctgcgagtgatcttcttgcagtggct

SEQ ID NO: 604 - protein, 263 aa, synthetic construct
  REGION 1..263: note = Round 2 (Selectivity)
MVSAHFILIHSICHGAWLWYKLIPLLQSAGHNVTAIDLVASGIDPRQLEQIGTWEQYSEPLFTLIESIPEGKKVILVGESGGGINIALAAEKYPEKVSALVFHNALMPDIDHSPAFVLKKWSEVFTDWKDSIFSNYTYGNDTVTAVELGDRTLAENIFSNSPIEDVELAKHLVRKGSFFEQDLDTLPNFTSEGYGSVRRVYVYGEEDQIFSRDFQLWQINNYKPDKVYCVPSADHKIQISKVNELAQILQEVANSASDLLAVA

SEQ ID NO: 605 - DNA, 789 bp, synthetic construct
  misc_feature 1..789: note = Round 2 (Selectivity)
  source 1..789: mol_type = other DNA
atggttagtgcgcattttattctgatccacagtatttgccatggcgcctggctgtggtataaactgatcccgctattacagtctgcaggtcataacgttacggcgattgatcttgtggctagcgggatcgaccctcgccaactggaacagattggcacatgggagcagtactcagaaccattgttcaccctgatcgaatcgattccggaaggtaagaaagtcattctggtaggagaatccggtggcggcatcaatattgcactggccgcggagaaatatccggagaaagtgagcgccctcgtctttcacaacgcacttatgcccgatatcgatcacagtccagcgttcgtgctgaagaaatggagcgaagttttcactgactggaaagattcgatcttcagcaattatacctacggtaacgacacggttaccgcggtggaattgggagatcgtactctggccgagaacatcttctccaattctccgattgaagatgtagaactggcgaaacatctggtccgccctggctccttctttgagcaagacttggataccctgccgaactttacgtcggaagggtatggttcaattcgtcgtgtgtatgtttacggcgaagaagaccagatctttagccgcgattttcagttatggcaaattaataattataagcctgataaagtgtactgtgtaccgagtgctgaccacaagattcagatcagcaaagtcaacgagctggcccagattctccaagaagttgcaaactctgcgagtgatcttcttgcagtggct

SEQ ID NO: 606 - protein, 263 aa, synthetic construct; identical to SEQ ID NO: 556
  REGION 1..263: note = Round 2 (Selectivity)

SEQ ID NO: 607 - DNA, 789 bp, synthetic construct
  misc_feature 1..789: note = Round 2 (Selectivity)
  source 1..789: mol_type = other DNA
atggttagtgcgcattttattctgatccacagtatttgccatggcgcctggctgtggtataaactgatcccgttattacagtctgcaggtcataacgttacggcgattgatcttgtggctagcgggatcgaccctcgccaactggaacagattggcacatgggagcagtactcagaaccattgttcaccctgatcgaatcgattccggaaggtaagaaagtcattctggtaggagaatccggtggcggcatcaatattgcactggccgcggagaaatatccggagaaagtgagcgccctcgtctttcacaacgcacttatgcccgatatcgatcacagtccagcgttcgtgtataagaaatatagcgaagttttcactgactggaaagattcgatcttcagcaattatacctacggtaacgacacggttaccgcggtggaattgggagatcgtactctggccgagaacatcttctccaattctccgattgaagatgtagaactggcgaaacatctggtccgcaaaggctccttctttgagcaagacttggataccctgccgaactttacgtcggaagggtatggttcaattcgtcgtgtgtatgtttacggcgaagaagaccagatctttagccgcgattttcagttatggcaaattaataattataagcctgataaagtgtactgtatcccgagtgctgaccacaagattcagatcagcaaagtcaacgagctggcccagattctccaagaagttgcaaactctgcgagtgatcttcttgcagtggct

SEQ ID NO: 608 - protein, 263 aa, synthetic construct
  REGION 1..263: note = Round 2 (Selectivity)
MVSAHFILIHSICHGAWLWYKLIPLLQSAGHNVTAIDLVASGIDPRQLEQIGTWEQYSEPLFTLIESIPEGKKVILVGESGGGINIALAAEKYPEKVSALVFHNALMPDIDHSPAFVYKKYSEVFTDWKDSIFSNYTYGNDTVTAVELGDRTLAENIFSNSPIEDVELAKHLVRKGSFFEQDLDTLPNFTSEGYGSIRRVYVYGEEDQIFSRDFQLWQINNYKPDKVYCIPSADHKIQISKVNELAQILQEVANSASDLLAVA

SEQ ID NO: 609 - DNA, 789 bp, synthetic construct
  misc_feature 1..789: note = Round 2 (Selectivity)
  source 1..789: mol_type = other DNA
atggttagtgcgcattttattctgatccacagtatttgccatggcgcctggctgtggtataaactgatcccgttattacagtctgcaggtcataacgttacggcgattgatctttgggctagcgggatcaaccctcgccaactggaacagattggcacatgggagcagtactcagaaccattgttcaccctgatcgaatcgattccggaaggtaagaaagtcattctggtaggagaatccggtggcggcatcaatattgcactggccgcggagaaatatccggagaaagtgagcgccctcgtctttcacaacgcacttatgcccgatatcgatcacagtccagcgttcgtgtataagaaatatagcgaagttttcactgactggaaagattcgatcttcagcaattatacctacggtaacgacacggttaccgcggtggaattgggagatcgtactctggccgagaacatcttctccaattctccgattgaagatgtagaactggcgaaacatctggtccgcaaaggctccttctttgagcaagacttggataccctgccgaactttacgtcggaagggtatggttcaattcgtcgtgtgtatgtttacggcgaagaagaccagatctttagccgcgattttcagttatggcaaattaataattataagcctgataaagtgtactgtatcccgagtgctgaccacaagattcagatcagcaaagtcaacgagctggcccagattctccaagaagttgcaaactctgcgagtgatcttcttgcagtggct

SEQ ID NO: 610 - protein, 263 aa, synthetic construct
  REGION 1..263: note = Round 2 (Selectivity)
MVSAHFILIHSICHGAWLWYKLIPLLQSAGHNVTAIDLWASGINPRQLEQIGTWEQYSEPLFTLIESIPEGKKVILVGESGGGINIALAAEKYPEKVSALVFHNALMPDIDHSPAFVYKKYSEVFTDWKDSIFSNYTYGNDTVTAVELGDRTLAENIFSNSPIEDVELAKHLVRKGSFFEQDLDTLPNFTSEGYGSIRRVYVYGEEDQIFSRDFQLWQINNYKPDKVYCIPSADHKIQISKVNELAQILQEVANSASDLLAVA

SEQ ID NO: 611 - DNA, 789 bp, synthetic construct
  misc_feature 1..789: note = Round 2 (Selectivity)
  source 1..789: mol_type = other DNA
atggttagtgcgcattttattctgatccacagtatttgccatggcgcctggatctggtataaactgatcccgttattacagtctgcaggtcataacgttacggcgattgatctttgggctagcgggatcaaccctcgccaactggaacagattggcacatgggagcagtactcagaaccattgttcaccctgatcgaatcgattccggaaggtaagaaagtcattctggtaggagaatccggtggcggcatcaatattgcactggccgcggagaaatatccggagaaagtgagcgccctcgtctttcacaacgcacttatgcccgatatcgatcacagtccagcgttcgtgtataagaaaaccagcgaagttttcactgactggaaagattcgatcttcagcaattatacctacggtaacgacacggttaccgcggtggaattgggagatcgtactctggccgagaacatcttctccaattctccgattgaagatgtagaactggcgaaacatctggtccgcaaaggctccttctttgagcaagacttggataccctgccgaactttacgtcggaagggtatggttcaattcgtcgtgtgtatgtttacggcgaagaagaccagatctttagccgcgattttcagttatggcaaattaataattataagcctgataaagtgtactgtgtaccgagtgctgaccacaagattcagatcagcaaagtcaacgagctggcccagattctccaagaagttgcaaactctgcgagtgatcttcttgcagtggct

SEQ ID NO: 612 - protein, 263 aa, synthetic construct
  REGION 1..263: note = Round 2 (Selectivity)
MVSAHFILIHSICHGAWIWYKLIPLLQSAGHNVTAIDLWASGINPRQLEQIGTWEQYSEPLFTLIESIPEGKKVILVGESGGGINIALAAEKYPEKVSALVFHNALMPDIDHSPAFVYKKTSEVFTDWKDSIFSNYTYGNDTVTAVELGDRTLAENIFSNSPIEDVELAKHLVRKGSFFEQDLDTLPNFTSEGYGSIRRVYVYGEEDQIFSRDFQLWQINNYKPDKVYCVPSADHKIQISKVNELAQILQEVANSASDLLAVA

SEQ ID NO: 613 - DNA, 789 bp, synthetic construct
  misc_feature 1..789: note = Round 2 (Selectivity)
  source 1..789: mol_type = other DNA
atggttagtgcgcattttattctgatccacagtatttgccatggcgcctggctgtggtataaactgatcccgttattacagtctgcaggtcataacgttacggcgattgatctttgggctagcgggatcgaccctcgccaactggaacagattggcacatgggagcagtactcagaaccattgttcaccctgatcgaatcgattccggaaggtaagaaagtcattctggtaggagaatccggtggcggcatcaatattgcactggccgcggagaaatatccggagaaagtgagcgccctcgtctttcacaacgcacttatgcccgatatcgatcacagtccagcgttcgtgtataagaaatggagcgaagttttcactgactggaaagattcgatcttcagcaattatacctacggtaacgacacggttaccgcggtggaattgggagatcgtactctggccgagaacatcttctccaattctccgattgaagatgtagaactggcgaaacatctggtccgcaaaggctccttctttgagcaagacttggataccctgccgaactttacgtcggaagggtatggttcaattcgtcgtgtgtatgtttacggcgaagaagaccagatctttagccgcgattttcagttatggcaaattaataattataagcctgataaagtgtactgtgtaccgagtgctgaccacaagattcagatcagcaaagtcaacgagctggcccagattctccaagaagttgcaaactctgcgagtgatcttcttgcagtggct

SEQ ID NO: 614 - protein, 263 aa, synthetic construct
  REGION 1..263: note = Round 2 (Selectivity)
MVSAHFILIHSICHGAWLWYKLIPLLQSAGHNVTAIDLWASGIDPRQLEQIGTWEQYSEPLFTLIESIPEGKKVILVGESGGGINIALAAEKYPEKVSALVFHNALMPDIDHSPAFVYKKWSEVFTDWKDSIFSNYTYGNDTVTAVELGDRTLAENIFSNSPIEDVELAKHLVRKGSFFEQDLDTLPNFTSEGYGSIRRVYVYGEEDQIFSRDFQLWQINNYKPDKVYCVPSADHKIQISKVNELAQILQEVANSASDLLAVA

SEQ ID NO: 615 - DNA, 789 bp, synthetic construct
  misc_feature 1..789: note = Round 2 (Selectivity)
  source 1..789: mol_type = other DNA
atggttagtgcgcattttattctgatccacagtatttgccatggcgcctggctctggtataaactgatcccgttattacagtctgcaggtcataacgctacggcgattgatctttgggctagcgggatcgaccctcgccaactggaacagattggcacatgggagcagtactcagaaccattgttcaccctgatcgaatcgattccggaaggtaagaaagtcattctggtaggagaatccggtggcggcatcaatattgcactggccgcggagaaatatccggagaaagtgagcgccctcgtctttcacaacgcacttatgcccgatatcgatcacagtccagcgttcgtgtataagaaatggagcgaagttttcactgactggaaagattcgatcttcagcaattatacctacggtaacgacacggttaccgcggtggaattgggagatcgtactctggccgagaacatcttctccaattctccgattgaagatgtagaactggcgaaacatctggtccgcaaaggctccttctttgagcaagacttggataccctgccgaactttacgtcggaagggtatggttcaattcgtcgtgtgtatgtttacggcgaagaagaccagatctttagccgcgattttcagttatggcaaattaataattataagcctgataaagtgtactgtgtaccgagtgctgaccacaagattcagatcagcaaagtcaacgagctggcccagattctccaagaagttgcaaactctgcgagtgatcttcttgcagtggct

SEQ ID NO: 616 - protein, 263 aa, synthetic construct
  REGION 1..263: note = Round 2 (Selectivity)
MVSAHFILIHSICHGAWLWYKLIPLLQSAGHNATAIDLWASGIDPRQLEQIGTWEQYSEPLFTLIESIPEGKKVILVGESGGGINIALAAEKYPEKVSALVFHNALMPDIDHSPAFVYKKWSEVFTDWKDSIFSNYTYGNDTVTAVELGDRTLAENIFSNSPIEDVELAKHLVRKGSFFEQDLDTLPNFTSEGYGSIRRVYVYGEEDQIFSRDFQLWQINNYKPDKVYCVPSADHKIQISKVNELAQILQEVANSASDLLAVA

SEQ ID NO: 617 - DNA, 789 bp, synthetic construct
  misc_feature 1..789: note = Round 2 (Selectivity)
  source 1..789: mol_type = other DNA
atggttagtgcgcattttattctgatccacagtatttgccatggcgcctggctctggtataaactgatcccgttattacagtctgcaggtcataacgttacggcgattgatctttgggctagcgggatcgaccctcgccaactggaacagattggcacatgggagcagtactcagaaccattgttcaccctgatcgaatcgattccggaaggtaagaaagtcattctggtaggagaatccggtggcggcatcaatattgcactggccgcggagaaatatccggagaaagtgagcgccctcgtctttcacaacgcacttatgcccgatatcgatcacagtccagcgttcgtgctgaagaaatggagcgaagttttcactgactggaaagattcgatcttcagcaattatacctacggtaacgacacggttaccgcggtggaattgggagatcgtactctggccgagaacatcttctccaattctccgattgaagatgtagaactggcgaaacatctggtccgccctggctccttctttgagcaagacttggataccctgccgaactttacgtcggaagggtatggttcaattcgtcgtgtgtatgtttacggcgaagaagaccagatctttagccgcgattttcagttatggcaaattaataattataagcctgataaagtgtactgtgtcccgagtgctgaccacaagattcagatcagcaaagtcaacgagctggcccagattctccaagaagttgcaaactctgcgagtgatcttcttgcagtggct

SEQ ID NO: 618 - protein, 263 aa, synthetic construct
  REGION 1..263: note = Round 2 (Selectivity)
MVSAHFILIHSICHGAWLWYKLIPLLQSAGHNVTAIDLWASGIDPRQLEQIGTWEQYSEPLFTLIESIPEGKKVILVGESGGGINIALAAEKYPEKVSALVFHNALMPDIDHSPAFVLKKWSEVFTDWKDSIFSNYTYGNDTVTAVELGDRTLAENIFSNSPIEDVELAKHLVRPGSFFEQDLDTLPNFTSEGYGSIRRVYVYGEEDQIFSRDFQLWQINNYKPDKVYCVPSADHKIQISKVNELAQILQEVANSASDLLAVA

SEQ ID NO: 619 - DNA, 789 bp, synthetic construct
  misc_feature 1..789: note = Round 2 (Selectivity)
  source 1..789: mol_type = other DNA
atggttagtgcgcattttattctgatccacagtatttgccatggcgcctggctctggtataaactgatcccgttattacagtctgcaggtcataacgctacggcgattgatcttgtggctagcggggaggaccctcgccaactggaacagattggcacatgggagcagtactcagaaccattgttcaccctgatcgaatcgattccggaaggtaagaaagtcattctggtaggagaatccggtggcggcatcaatattgcactggccgcggagaaatatccggagaaagtgagcgccctcgtctttcacaacgcacttatgcccgatatcgatcacagtccagcgttcgtgtacaagaaatttagcgaagttttcactgactggaaagattcgatcttcagcaattatacctacggtaacgacacggttaccgcggtggaattgggagatcgtactctggccgagaacatcttctccaattctccgattgaagatgtagaactggcgaaacatctggtccgcaaaggctccttctttgagcaagacttggataccctgccgaactttacgtcggaagggtatggttcaattcgtcgtgtgtatgtttacggcgaagaagaccagatctttagccgcgattttcagttatggcaaattaataattataagcctgataaagtgtactgtgtaccgagtgctgaccacaagattcagatcagcaaagtcaacgagctggcccagattctccaagaagttgcaaactctgcgagtgatcttcttgcagtggct

SEQ ID NO: 620 - protein, 263 aa, synthetic construct
  REGION 1..263: note = Round 2 (Selectivity)
MVSAHFILIHSICHGAWLWYKLIPLLQSAGHNATAIDLVASGEDPRQLEQIGTWEQYSEPLFTLIESIPEGKKVILVGESGGGINIALAAEKYPEKVSALVFHNALMPDIDHSPAFVYKKFSEVFTDWKDSIFSNYTYGNDTVTAVELGDRTLAENIFSNSPIEDVELAKHLVRKGSFFEQDLDTLPNFTSEGYGSIRRVYVYGEEDQIFSRDFQLWQINNYKPDKVYCVPSADHKIQISKVNELAQILQEVANSASDLLAVA

SEQ ID NO: 621 - DNA, 789 bp, synthetic construct
  misc_feature 1..789: note = Round 2 (Selectivity)
  source 1..789: mol_type = other DNA
atggttagtgcgcattttattctgatccacagtatttgccatggcgcctggctctggtataaactgatcccgttattacagtctgcaggtcataacgctacggcgattgatcttgtggctagcgggatcgaccctcgccaactggaacagattggcacatgggagcagtactcagaaccattgttcaccctgatcgaatcgattccggaaggtaagaaagtcattctggtaggagaatccggtggcggcatcaatattgcactggccgcggagaaatatccggagaaagtgagcgccctcgtctttcacaacgcacttatgcccgatatcgatcacagtccagcgttcgtgtataagaaatatagcgaagttttcactgactggaaagattcgatcttcagcaattatacctacggtaacgacacggttaccgcggtggaattgggagatcgtactctggccgagaacatcttctccaattctccgattgaagatgtagaactggcgaaacatctggtccgccctggctccttctttgagcaagacttggataccctgccgaactttacgtcggaagggtatggttcaattcgtcgtgtgtatgtttacggcgaagaagaccagatctttagccgcgattttcagttatggcaaattaataattataagcctgataaagtgtactgtatcccgagtgctgaccacaagattcagatcagcaaagtcaacgagctggcccagattctccaagaagttgcaaactctgcgagtgatcttcttgcagtggct

SEQ ID NO: 622 - protein, 263 aa, synthetic construct
  REGION 1..263: note = Round 2 (Selectivity)
MVSAHFILIHSICHGAWLWYKLIPLLQSAGHNATAIDLVASGIDPRQLEQIGTWEQYSEPLFTLIESIPEGKKVILVGESGGGINIALAAEKYPEKVSALVFHNALMPDIDHSPAFVYKKYSEVFTDWKDSIFSNYTYGNDTVTAVELGDRTLAENIFSNSPIEDVELAKHLVRPGSFFEQDLDTLPNFTSEGYGSIRRVYVYGEEDQIFSRDFQLWQINNYKPDKVYCIPSADHKIQISKVNELAQILQEVANSASDLLAVA

SEQ ID NO: 623 - DNA, 789 bp, synthetic construct
  misc_feature 1..789: note = Round 2 (Selectivity)
  source 1..789: mol_type = other DNA
atggttagtgcgcattttattctgatccacagtatttgccatggcgcctggctctggtataaactgatcccgttattacagtctgcaggtcataacgctacggcgattgatcttgtggctagcgggatcgaccctcgccaactggaacagattggcacatgggagcagtactcagaaccattgttcaccctgatcgaatcgattccggaaggtaagaaagtcattctggtaggagaatccggtggcggcatcaatattgcactggccgcggagaaatatccggagaaagtgagcgccctcgtctttcacaacgcacttatgcccgatatcgatcacagtccagcgttcgtgtacaagaaatttagcgaagttttcactgactggaaagattcgatcttcagcaattatacctacggtaacgacacggttaccgcggtggaattgggagatcgtactctggccgagaacatcttctccaattctccgattgaagatgtagaactggcgaaacatagggtccgcaaaggctccttctttgagcaagacttggataccctgccgaactttacgtcggaagggtatggttcaattcgtcgtgtgtatgtttacggcgaagaagaccagatctttagccgcgattttcagttatggcaaattaataattataagcctgataaagtgtactgtgtaccgagtgctgaccacaagattcagatcagcaaagtcaacgagctggcccagattctccaagaagttgcaaactctgcgagtgatcttcttgcagtggct

SEQ ID NO: 624 - protein, 263 aa, synthetic construct
  REGION 1..263: note = Round 2 (Selectivity)
MVSAHFILIHSICHGAWLWYKLIPLLQSAGHNATAIDLVASGIDPRQLEQIGTWEQYSEPLFTLIESIPEGKKVILVGESGGGINIALAAEKYPEKVSALVFHNALMPDIDHSPAFVYKKFSEVFTDWKDSIFSNYTYGNDTVTAVELGDRTLAENIFSNSPIEDVELAKHRVRKGSFFEQDLDTLPNFTSEGYGSIRRVYVYGEEDQIFSRDFQLWQINNYKPDKVYCVPSADHKIQISKVNELAQILQEVANSASDLLAVA

SEQ ID NO: 625 - DNA, 789 bp, synthetic construct
  misc_feature 1..789: note = Round 2 (Selectivity)
  source 1..789: mol_type = other DNA
atggttagtgcgcattttattctgatccacagtatttgccatggcgcctggatctggtataaactgatcccgttattacagtctgcaggtcataacgctacggcgattgatcttgtggctagcgggatcgaccctcgccaactggaacagattggcacatgggagcagtactcagaaccattgttcaccctgatcgaatcgattccggaaggtaagaaagtcattctggtaggagaatccggtggcggcatcaatattgcactggccgcggagaaatatccggagaaagtgagcgccctcgtctttcacaacgcacttatgcccgatatcgatcacagtccagcgttcgtgctgaagaaatggagcgaagttttcactgactggaaagattcgatcttcagcaattatacctacggtaacgacacggttaccgcggtggaattgggagatcgtactctggccgagaacatcttctccaattctccgattgaagatgtagaactggcgaaacatctggtccgcaaaggctccttctttgagcaagacttggataccctgccgaactttacgtcggaagggtatggttcaattcgtcgtgtgtatgtttacggcgaagaagaccagatcatgagccgcgattttcagttatggcaaattaataattataagcctgataaagtgtactgtgtaccgagtgctgaccacaagattcagatcagcaaagtcaacgagctggcccagattctccaagaagttgcaaactctgcgagtgatcttcttgcagtggct

SEQ ID NO: 626 - protein, 263 aa, synthetic construct
  REGION 1..263: note = Round 2 (Selectivity)
MVSAHFILIHSICHGAWIWYKLIPLLQSAGHNATAIDLVASGIDPRQLEQIGTWEQYSEPLFTLIESIPEGKKVILVGESGGGINIALAAEKYPEKVSALVFHNALMPDIDHSPAFVLKKWSEVFTDWKDSIFSNYTYGNDTVTAVELGDRTLAENIFSNSPIEDVELAKHLVRKGSFFEQDLDTLPNFTSEGYGSIRRVYVYGEEDQIMSRDFQLWQINNYKPDKVYCVPSADHKIQISKVNELAQILQEVANSASDLLAVA

SEQ ID NO: 627 - DNA, 789 bp, synthetic construct
  misc_feature 1..789: note = Round 2 (Selectivity)
  source 1..789: mol_type = other DNA
atggttagtgcgcattttattctggttcacagtattggtcatggcgcctggctatggtataaactgatcccgttattacagtctgcaggtcataacgctacggcgattgatctttgggctagcgggatcgaccctcgccaactggaacagattggcacatgggagcagtactcagaaccattgttcaccctgatcgaatcgatcccggaaggtgaaaaagtcattctggtaggagaatccggtggcggcatcaatattgcactggccgcggagaaatatccggagaaagttagcgccctcgtctttcacaacgcacttatgcccgatatcgatcacagtccagcgttcgtgtacaagaaatttactgaagttttcactgactggaaagattcgatcttcagcaattatacctacggtaacgacacggttaccgcggtggaattgggagatcgtactctggccgagaacatcttctccaattctccgattgaagatgtagaactggcgaaacatctggtccgcaaaggctccttctttgagcaagacttggataccctgccgaactttacgtcggaagggtatggttcaattcgtcgtgtgtatgtttacggcgaagaagaccagatctttagccgcgattttcagttatggcaaattaataattataagcctgataaagtgtactgtgtaccgagtgctgaccacaagattcagattagcaaagtcaacgagctggcccagattctccaagaagttgcaaactctgcgagtgatcttcttgcagtggct

SEQ ID NO: 628 - protein, 263 aa, synthetic construct
  REGION 1..263: note = Round 2 (Selectivity)
MVSAHFILVHSIGHGAWLWYKLIPLLQSAGHNATAIDLWASGIDPRQLEQIGTWEQYSEPLFTLIESIPEGEKVILVGESGGGINIALAAEKYPEKVSALVFHNALMPDIDHSPAFVYKKFTEVFTDWKDSIFSNYTYGNDTVTAVELGDRTLAENIFSNSPIEDVELAKHLVRKGSFFEQDLDTLPNFTSEGYGSIRRVYVYGEEDQIFSRDFQLWQINNYKPDKVYCVPSADHKIQISKVNELAQILQEVANSASDLLAVA

SEQ ID NO: 629 - DNA, 789 bp, synthetic construct
  misc_feature 1..789: note = Round 2 (Selectivity)
  source 1..789: mol_type = other DNA
atggttagtgcgcattttattctgatccacagtatttgccatggcgcctggatctggtataaactgatcccgttattacagtctgcaggtcataacgctacggcgattgatctttgggctagcgggatcaaccctcgccaactggaacagattggcacatgggagcagtactcagaaccattgttcaccctgatcgaatcgattccggaaggtaagaaagtcattctggtaggagaatccggtggcggcatcaatattgcactggccgcggagaaatatccggagaaagtgagcgccctcgtctttcacaacgcacttatgcccgatatcgatcacagtccagcgttcgtgctgaagaaatggagcgaagttttcactgactggaaagattcgatcttcagcaattatacctacggtaacgacacggttaccgcggtggaattgggagatcgtactctggccgagaacatcttctccaattctccgattgaagatgtagaactggcgaaacatctggtccgcaaaggctccttctttgagcaagacttggataccctgccgaactttacgtcggaagggtatggttcaattcgtcgtgtgtatgtttacggcgaagaagaccagatctttagccgcgattttcagttatggcaaattaataattataagcctgataaagtgtactgtatcccgagtgctgaccacaagattcagatcagcaaagtcaacgagctggcccagattctccaagaagttgcaaactctgcgagtgatcttcttgcagtggct

SEQ ID NO: 630 - protein, 263 aa, synthetic construct
  REGION 1..263: note = Round 2 (Selectivity)
MVSAHFILIHSICHGAWIWYKLIPLLQSAGHNATAIDLWASGINPRQLEQIGTWEQYSEPLFTLIESIPEGKKVILVGESGGGINIALAAEKYPEKVSALVFHNALMPDIDHSPAFVLKKWSEVFTDWKDSIFSNYTYGNDTVTAVELGDRTLAENIFSNSPIEDVELAKHLVRKGSFFEQDLDTLPNFTSEGYGSIRRVYVYGEEDQIFSRDFQLWQINNYKPDKVYCIPSADHKIQISKVNELAQILQEVANSASDLLAVA

SEQ ID NO: 631 - DNA, 789 bp, synthetic construct
  misc_feature 1..789: note = Round 2 (Selectivity)
  source 1..789: mol_type = other DNA
atggttagtgcgcattttattctgatccacagtatttgccatggcgcctggctctggtataaactgatcccgttattacagtctgcaggtcataacgctacggcgattgatcttgtggctagcgggtgggaccctcgccaactggaacagattggcacatgggagcagtactcagaaccattgttcaccctgatcgaatcgattccggaaggtaagaaagtcattctggtaggagaatccggtggcggcatcaatattgcactggccgcggagaaatatccggagaaagtgagcgccctcgtctttcacaacgcacttatgcccgatatcgatcacagtccagcgttcgtgtacaagaaatttagcgaagttttcactgactggaaagattcgatcttcagcaattatacctacggtaacgacacggttaccgcggtggaattgggagatcgtactctggccgagaacatcttctccaattctccgattgaagatgtagaactggcgaaacatctggtccgcaaaggctccttctttgagcaagacttggataccctgccgaactttacgtcggaagggtatggttcaattcgtcgtgtgtatgtttacggcgaagaagaccagatctttagccgcgattttcagttatggcaaattaataattataagcctgataaagtgtactgtgtaccgagtgctgaccacaagattcagatcagcaaagtcaacgagctggcccagattctccaagaagttgcaaactctgcgagtgatcttcttgcagtggct

SEQ ID NO: 632 - protein, 263 aa, synthetic construct
  REGION 1..263: note = Round 2 (Selectivity)
MVSAHFILIHSICHGAWLWYKLIPLLQSAGHNATAIDLVASGWDPRQLEQIGTWEQYSEPLFTLIESIPEGKKVILVGESGGGINIALAAEKYPEKVSALVFHNALMPDIDHSPAFVYKKFSEVFTDWKDSIFSNYTYGNDTVTAVELGDRTLAENIFSNSPIEDVELAKHLVRKGSFFEQDLDTLPNFTSEGYGSIRRVYVYGEEDQIFSRDFQLWQINNYKPDKVYCVPSADHKIQISKVNELAQILQEVANSASDLLAVA

SEQ ID NO: 633 - DNA, 789 bp, synthetic construct
  misc_feature 1..789: note = Round 2 (Selectivity)
  source 1..789: mol_type = other DNA
atggttagtgcgcattttattctggttcacagtattggtcatggcgcctggctctggtataaactgatcccgttattacagtctgcaggtcataacgctacggcgattgatcttgtggctagcgggatcgaccctcgccaactggaacagattggcacatgggagcagtactcagaaccattgttcaccctgatcgaatcgatcccggaaggtaaaaaagtcattctggtaggagaatccggtggcggcatcaatattgcactggccgcggagaaatatccggagaaagtgagcgccctcgtctttcacaacgcacttatgcccgatatcgatcacagtccagcgttcgtgtacaagaaatttagcgaagttttcactgactggaaagattcgatcttcagcaattatacctacggtaacgacacggttaccgcggtggaattgggagatcgtactctggccgagaacatcttctccaattctccgattgaagatgtagaactggcgaaacatctggtccgcaaaggctccttctttgagcaagacttggataccctgccgaactttacgtcggaagggtatggttcaattcgtcgtgtgtatgtttacggcgaagaagaccagatctttagccgcgattttcagttatggcaaattaataattataagcctgataaagtgtactgtgtaccgagtgctgaccacaagattcagatcagcaaagtcaacgagctggcccagattctccaagaagttgcaaactctgcgagtgatcttcttgcagtggct

SEQ ID NO: 634 - protein, 263 aa, synthetic construct
  REGION 1..263: note = Round 2 (Selectivity)
MVSAHFILVHSIGHGAWLWYKLIPLLQSAGHNATAIDLVASGIDPRQLEQIGTWEQYSEPLFTLIESIPEGKKVILVGESGGGINIALAAEKYPEKVSALVFHNALMPDIDHSPAFVYKKFSEVFTDWKDSIFSNYTYGNDTVTAVELGDRTLAENIFSNSPIEDVELAKHLVRKGSFFEQDLDTLPNFTSEGYGSIRRVYVYGEEDQIFSRDFQLWQINNYKPDKVYCVPSADHKIQISKVNELAQILQEVANSASDLLAVA

SEQ ID NO: 635 - DNA, 789 bp, synthetic construct
  misc_feature 1..789: note = Round 2 (Selectivity)
  source 1..789: mol_type = other DNA
atggttagtgcgcattttattctgatccacagtatttgccatggcgcctggctctggtataaactgatcccgttattacagtctgcaggtcataacgttacggcgattgatctttgggctagcgggatcgaccctcgccaactggaacagattggcacatgggagcagtactcagaaccattgttcaccctgatcgaatcgattccggaaggtaagaaagtcattctggtaggagaatccggtggcggcatcaatattgcactggccgcggagaaatatccggagaaagtgagcgccctcgtctttcacaacgcacttatgcccgatatcgatcacagtccagcgttcgtgctgaagaaatatagcgaagttttcactgactggaaagattcgatcttcagcaattatacctacggtaacgacacggttaccgcggtggaattgggagatcgtactctggccgagaacatcttctccaattctccgattgaagatgtagaactggcgaaacatctggtccgccctggctccttctttgagcaagacttggataccctgccgaactttacgtcggaagggtatggttcaattcgtcgtgtgtatgtttacggcgaagaagaccagatctttagccgcgattttcagttatggcaaattaataattataagcctgataaagtgtactgtatcccgagtgctgaccacaagattcagatcagcaaagtcaacgagctggcccagattctccaagaagttgcaaactctgcgagtgatcttcttgcagtggct

SEQ ID NO: 636 - protein, 263 aa, synthetic construct
  REGION 1..263: note = Round 2 (Selectivity)
MVSAHFILIHSICHGAWLWYKLIPLLQSAGHNVTAIDLWASGIDPRQLEQIGTWEQYSEPLFTLIESIPEGKKVILVGESGGGINIALAAEKYPEKVSALVFHNALMPDIDHSPAFVLKKYSEVFTDWKDSIFSNYTYGNDTVTAVELGDRTLAENIFSNSPIEDVELAKHLVRPGSFFEQDLDTLPNFTSEGYGSIRRVYVYGEEDQIFSRDFQLWQINNYKPDKVYCIPSADHKIQISKVNELAQILQEVANSASDLLAVA

SEQ ID NO: 637 - DNA, 789 bp, synthetic construct
  misc_feature 1..789: note = Round 2 (Selectivity)
  source 1..789: mol_type = other DNA
atggttagtgcgcattttattctgatccacagtatttgccatggcgcctggatctggtataaactgatcccgttattacagtctgcaggtcataacgctacggcgattgatcttgtggctagcgggatcgaccctcgccaactggaacagattggcacatgggagcagtactcagaaccattgttcaccctgatcgaatcgattccggaaggtaagaaagtcattctggtaggagaatccggtggcggcatcaatattgcactggccgcggagaaatatccggagaaagtgagcgccctcgtctttcacaacgcacttatgcccgatatcgatcacagtccagcgttcgtgctgaagaaatatagcgaagttttcactgactggaaagattcgatcttcagcaattatacctacggtaacgacacggttaccgcggtggaattgggagatcgtactctggccgagaacatcttctccaattctccgattgaagatgtagaactggcgaaacatctggtccgcaaaggctccttctttgagcaagacttggataccctgccgaactttacgtcggaagggtatggttcaattcgtcgtgtgtatgtttacggcgaagaagaccagatctttagccgcgattttcagttatggcaaattaataattataagcctgataaagtgtactgtatcccgagtgctgaccacaagattcagatcagcaaagtcaacgagctggcccagattctccaagaagttgcaaactctgcgagtgatcttcttgcagtggct

SEQ ID NO: 638 - protein, 263 aa, synthetic construct
  REGION 1..263: note = Round 2 (Selectivity)
MVSAHFILIHSICHGAWIWYKLIPLLQSAGHNATAIDLVASGIDPRQLEQIGTWEQYSEPLFTLIESIPEGKKVILVGESGGGINIALAAEKYPEKVSALVFHNALMPDIDHSPAFVLKKYSEVFTDWKDSIFSNYTYGNDTVTAVELGDRTLAENIFSNSPIEDVELAKHLVRKGSFFEQDLDTLPNFTSEGYGSIRRVYVYGEEDQIFSRDFQLWQINNYKPDKVYCIPSADHKIQISKVNELAQILQEVANSASDLLAVA

SEQ ID NO: 639 - DNA, 789 bp, synthetic construct
  misc_feature 1..789: note = Round 2 (Selectivity)
  source 1..789: mol_type = other DNA
atggttagtgcgcattttattctgatccacagtatttgccatggcgcctggctgtggtataaactgatcccgttattacagtctgcaggtcataacgttacggcgattgatctttgggctagcgggatcaaccctcgccaactggaacagattggcacatgggagcagtactcagaaccattgttcaccctgatcgaatcgattccggaaggtaagaaagtcattctggtaggagaatccggtggcggcatcaatattgcactggccgcggagaaatatccggagaaagtgagcgccctcgtctttcacaacgcacttatgcccgatatcgatcacagtccagcgttcgtgtataagaaatatagcgaagttttcactgactggaaagattcgatcttcagcaattatacctacggtaacgacacggttaccgcggtggaattgggagatcgtactctggccgagaacatcttctccaattctccgattgaagatgtagaactggcgaaacatctggtccgccctggctccttctttgagcaagacttggataccctgccgaactttacgtcggaagggtatggttcaatccgtcgtgtgtatgtttacggcgaagaagaccagatcatgagccgcgattttcagttatggcaaattaataattataagcctgataaagtgtactgtgtcccgagtgctgaccacaagattcagatcagcaaagtcaacgagctggcccagattctccaagaagttgcaaactctgcgagtgatcttcttgcagtggct

SEQ ID NO: 640 - protein, 263 aa, synthetic construct
  REGION 1..263: note = Round 2 (Selectivity)
MVSAHFILIHSICHGAWLWYKLIPLLQSAGHNVTAIDLWASGINPRQLEQIGTWEQYSEPLFTLIESIPEGKKVILVGESGGGINIALAAEKYPEKVSALVFHNALMPDIDHSPAFVYKKYSEVFTDWKDSIFSNYTYGNDTVTAVELGDRTLAENIFSNSPIEDVELAKHLVRPGSFFEQDLDTLPNFTSEGYGSIRRVYVYGEEDQIMSRDFQLWQINNYKPDKVYCVPSADHKIQISKVNELAQILQEVANSASDLLAVA

SEQ ID NO: 641 - DNA, 789 bp, synthetic construct
  misc_feature 1..789: note = Round 2 (Selectivity)
  source 1..789: mol_type = other DNA
atggttagtgcgcattttattctggttcacagtattggtcatggcgcctggctctggtataaactgatcccgttattacagtctgcaggtcataacgctacggcgattgatcttgtagctagcgggatcgaccctcgccaactggaacagattggcacatgggagcagtactcagaaccattgttcaccctgatcgaatcgctgccggaaggtaaaaaagtcattctggtaggagaatccggtggcggcatcaatattgcactggccgcggagaaatatccggagaaaattagcgccctcgtctttcacaacgcacttatgcccgatatcgatcacagtccagcgttcgtgtacaagaaatttagcgaagttttcactgactggaaagattcgatcttcagcaattatacctacggtaacgacacggttaccgcggtggaattgggagatcgtactctggccgagaacatcttctccaattctccgattgaagatgtagaactggcgaaacatctggtccgcaaaggctccttctttgagcaagacttggataccctgccgaactttacgtcggaagggtatggttcaattcgtcgtgtgtatgtttacggcgaagaagaccagatctttagccgcgattttcagttatggcaaattaataattataaacctgataaagtgtactgtgtaccgagtgctgaccacaagattcagtttagcaaagtcaacgagctggcccagattctccaagaagttgcaaactctgcgagtgatcttcttgcagtggct

SEQ ID NO: 642 - protein, 263 aa, synthetic construct
  REGION 1..263: note = Round 2 (Selectivity)
MVSAHFILVHSIGHGAWLWYKLIPLLQSAGHNATAIDLVASGIDPRQLEQIGTWEQYSEPLFTLIESLPEGKKVILVGESGGGINIALAAEKYPEKISALVFHNALMPDIDHSPAFVYKKFSEVFTDWKDSIFSNYTYGNDTVTAVELGDRTLAENIFSNSPIEDVELAKHLVRKGSFFEQDLDTLPNFTSEGYGSIRRVYVYGEEDQIFSRDFQLWQINNYKPDKVYCVPSADHKIQFSKVNELAQILQEVANSASDLLAVA

SEQ ID NO: 643 - DNA, 789 bp, synthetic construct
  misc_feature 1..789: note = Round 2 (Selectivity)
  source 1..789: mol_type = other DNA
atggttagtgcgcattttattctggttcacagtattggtcatggcgcctggctctggtataaactgatcccgttattacagtctgcaggtcataacgctacggcgattgatcttgtggctagcgggatcgaccctcgccaactggaacagattggcacatgggagcagtactcagaaccattgttcaccctgatcgaatcgatcccggaaggtgaaaaagtcattctggtaggagaatccggtggcggcatcaatattgcactggccgcggagaaatatccggagaaagtgagcgccctcgtctttcacaacgcacttatgcccgatatcgatcacagtccagcgttcgtgtacaagaaatttagtgaagttttcactgactggaaagattcgatcttcagcaattatacctacggtaacgacacggttaccgcggtggaattgggagatcgtactctggccgagaacatcttctccaattctccgattgaagatgtagaactggcgaaacatctggtccgcaaaggctccttctttgagcaagacttggataccctgccgaactttacgtcggaagggtatggttcaattcgtcgtgtgtatgtttacggcgaagaagaccagatctttagccgcgattttcagttatggcaaattaataattataagcctgataaagtgtactgtgtaccgagtgctgaccacaagattcagatcagcaaagtcaacgagctggcccagattctccaagaagttgcaaactctgcgagtgatcttcttgcagtggct

SEQ ID NO: 644 - protein, 263 aa, synthetic construct
  REGION 1..263: note = Round 2 (Selectivity)
MVSAHFILVHSIGHGAWLWYKLIPLLQSAGHNATAIDLVASGIDPRQLEQIGTWEQYSEPLFTLIESIPEGEKVILVGESGGGINIALAAEKYPEKVSALVFHNALMPDIDHSPAFVYKKFSEVFTDWKDSIFSNYTYGNDTVTAVELGDRTLAENIFSNSPIEDVELAKHLVRKGSFFEQDLDTLPNFTSEGYGSIRRVYVYGEEDQIFSRDFQLWQINNYKPDKVYCVPSADHKIQISKVNELAQILQEVANSASDLLAVA

SEQ ID NO: 645 - DNA, 789 bp, synthetic construct
  misc_feature 1..789: note = Round 2 (Selectivity)
  source 1..789: mol_type = other DNA
atggttagtgcgcattttattctggttcacagtattggtcatggcgcctggctctggtataaactgatcccgttattacagtctgcaggtcataacgctacggcgattgatcttgtagctagcgggatcgaccctcgccaactggaacagattggcacatgggagcagtactcagaaccattgttcaccctgatcgaatcgatcccggaaggtaaaaaagtcattctggtaggagaatccggtggcggcatcaatattgcactggccgcggagaaatatccggagaaagttagcgccctcgtctttcacaacgcacttatgcccgatatcgatcacagtccagcgttcgtgtacaagaaatttagtgaagttttcactgactggaaagattcgatcttcgataattatacctacggtaacgacacggttaccgcggtggaattgggagatcgtactctggccgagaacatcttctccaattctccgattgaagatgtagaactggcgaaacatctggtccgcaaaggctccttctttgagcaagacttggataccctgccgaactttacgtcggaagggtatggttcaattcgtcgtgtgtatgtttacggcgaagaagaccagatctttagccgcgattttcagttatggcaaattaataattataagcctgataaagtgtactgtgtaccgagtgctgaccacaagattcagattagcaaagtcaacgagctggcccagattctccaagaagttgcaaactctgcgagtgatcttcttgcagtggct

SEQ ID NO: 646 - protein, 263 aa, synthetic construct
  REGION 1..263: note = Round 2 (Selectivity)
MVSAHFILVHSIGHGAWLWYKLIPLLQSAGHNATAIDLVASGIDPRQLEQIGTWEQYSEPLFTLIESIPEGKKVILVGESGGGINIALAAEKYPEKVSALVFHNALMPDIDHSPAFVYKKFSEVFTDWKDSIFDNYTYGNDTVTAVELGDRTLAENIFSNSPIEDVELAKHLVRKGSFFEQDLDTLPNFTSEGYGSIRRVYVYGEEDQIFSRDFQLWQINNYKPDKVYCVPSADHKIQISKVNELAQILQEVANSASDLLAVA

SEQ ID NO: 647 - DNA, 789 bp, synthetic construct
  misc_feature 1..789: note = Round 2 (Selectivity)
  source 1..789: mol_type = other DNA
atggttagtgcgcattttattctgatccacagtatttgccatggcgcctggctgtggtataaactgatcccgttattacagtctgcaggtcataacgctacggcgattgatcttgtggctagcgggatcgaccctcgccaactggaacagattggcacatgggagcagtactcagaaccattgttcaccctgatcgaatcgattccggaaggtaagaaagtcattctggtaggagaatccggtggcggcatcaatattgcactggccgcggagaaatatccggagaaagtgagcgccctcgtctttcacaacgcacttatgcccgatatcgatcacagtccagcgttcgtgtataagaaatatagcgaagttttcactgactggaaagattcgatcttcagcaattatacctacggtaacgacacggttaccgcggtggaattgggagatcgtactctggccgagaacatcttctccaattctccgattgaagatgtagaactggcgaaacatctggtccgcaaaggctccttctttgagcaagacttggataccctgccgaactttacgtcggaagggtatggttcaattcgtcgtgtgtatgtttacggcgaagaagaccagatcatgagccgcgattttcagttatggcaaattaataattataagcctgataaagtgtactgtgtaccgagtgctgaccacaagattcagatcagcaaagtcaacgagctggcccagattctccaagaagttgcaaactctgcgagtgatcttcttgcagtggct

SEQ ID NO: 648 - protein, 263 aa, synthetic construct
  REGION 1..263: note = Round 2 (Selectivity)
MVSAHFILIHSICHGAWLWYKLIPLLQSAGHNATAIDLVASGIDPRQLEQIGTWEQYSEPLFTLIESIPEGKKVILVGESGGGINIALAAEKYPEKVSALVFHNALMPDIDHSPAFVYKKYSEVFTDWKDSIFSNYTYGNDTVTAVELGDRTLAENIFSNSPIEDVELAKHLVRKGSFFEQDLDTLPNFTSEGYGSIRRVYVYGEEDQIMSRDFQLWQINNYKPDKVYCVPSADHKIQISKVNELAQILQEVANSASDLLAVA

SEQ ID NO: 649 - DNA, 789 bp, synthetic construct
  misc_feature 1..789: note = Round 2 (Selectivity)
  source 1..789: mol_type = other DNA
atggttagtgcgcattttattctggttcacagtattggtcatggcgcctggctctggtataaactgatcccgttattacagtctgcaggtcataacgctacggcgattgatctttgggctagcgggatcgaccctcgccaactggaacagattggcacatgggagcagtactcagaaccattgttcaccctgatcgaatcgatcccggaaggtaaaaaagtcattctggtaggagaatccggtggcggcatcaatattgcactggccgcggagaaatatccggagaaaattagcgccctcgtctttcacaacgcacttatgcccgatatcgatcacagtccagcgttcgtgtacaagaaatttagcgaagttttcactgactggaaagattcgatcttcagcaattatacctacggtaacgacacggttaccgcggtggaattgggagatcgtactctggccgagaacatcttctccaattctccgattgaagatgtagaactggcgaaacatctggtccgcaaaggctccttctttgagcaagacttggataccctgccgaactttacgtcggaagggtatggttcaattcgtcgtgtgtatgtttacggcgaagaagaccagatctttagccgcgattttcagttatggcaaattaataattataagcctgataaagtgtactgtgtaccgagtgctgaccacaagattcagtttagcaaagtcaacgagctggcccagattctccaagaagttgcaaactctgcgagtgatcttcttgcagtggct

SEQ ID NO: 650 - protein, 263 aa, synthetic construct
  REGION 1..263: note = Round 2 (Selectivity)
MVSAHFILVHSIGHGAWLWYKLIPLLQSAGHNATAIDLWASGIDPRQLEQIGTWEQYSEPLFTLIESIPEGKKVILVGESGGGINIALAAEKYPEKISALVFHNALMPDIDHSPAFVYKKFSEVFTDWKDSIFSNYTYGNDTVTAVELGDRTLAENIFSNSPIEDVELAKHLVRKGSFFEQDLDTLPNFTSEGYGSIRRVYVYGEEDQIFSRDFQLWQINNYKPDKVYCVPSADHKIQFSKVNELAQILQEVANSASDLLAVA

SEQ ID NO: 651 - DNA, 789 bp, synthetic construct
  misc_feature 1..789: note = Round 2 (Selectivity)
  source 1..789: mol_type = other DNA
atggttagtgcgcattttattctgatccacagtatttgccatggcgcctggctctggtataaactgatcccgttattacagtctgcaggtcataacgttacggcgattgatctttgggctagcgggatcaaccctcgccaactggaacagattggcacatgggagcagtactcagaaccattgttcaccctgatcgaatcgattccggaaggtaagaaagtcattctggtaggagaatccggtggcggcatcaatattgcactggccgcggagaaatatccggagaaagtgagcgccctcgtctttcacaacgcacttatgcccgatatcgatcacagtccagcgttcgtgctgaagaaatggagcgaagttttcactgactggaaagattcgatcttcagcaattatacctacggtaacgacacggttaccgcggtggaattgggagatcgtactctggccgagaacatcttctccaattctccgattgaagatgtagaactggcgaaacatctggtccgcaagggctccttctttgagcaagacttggataccctgccgaactttacgtcggaagggtatggttcaatccgtcgtgtgtatgtttacggcgaagaagaccagatcatgagccgcgattttcagttatggcaaattaataattataagcctgataaagtgtactgtatcccgagtgctgaccacaagattcagatcagcaaagtcaacgagctggcccagattctccaagaagttgcaaactctgcgagtgatcttcttgcagtggct

SEQ ID NO: 652 - protein, 263 aa, synthetic construct
  REGION 1..263: note = Round 2 (Selectivity)
MVSAHFILIHSICHGAWLWYKLIPLLQSAGHNVTAIDLWASGINPRQLEQIGTWEQYSEPLFTLIESIPEGKKVILVGESGGGINIALAAEKYPEKVSALVFHNALMPDIDHSPAFVLKKWSEVFTDWKDSIFSNYTYGNDTVTAVELGDRTLAENIFSNSPIEDVELAKHLVRKGSFFEQDLDTLPNFTSEGYGSIRRVYVYGEEDQIMSRDFQLWQINNYKPDKVYCIPSADHKIQISKVNELAQILQEVANSASDLLAVA

SEQ ID NO: 653 - DNA, 789 bp, synthetic construct
  misc_feature 1..789: note = Round 2 (Selectivity)
  source 1..789: mol_type = other DNA
atggttagtgcgcattttattctgatccacagtatttgccatggcgcctggatctggtataaactgatcccgttattacagtctgcaggtcataacgttacggcgattgatctttgggctagcgggatcgaccctcgccaactggaacagattggcacatgggagcagtactcagaaccattgttcaccctgatcgaatcgattccggaaggtaagaaagtcattctggtaggagaatccggtggcggcatcaatattgcactggccgcggagaaatatccggagaaagtgagcgccctcgtctttcacaacgcacttatgcccgatatcgatcacagtccagcgttcgtgtataagaaaaccagcgaagttttcactgactggaaagattcgatcttcagcaattatacctacggtaacgacacggttaccgcggtggaattgggagatcgtactctggccgagaacatcttctccaattctccgattgaagatgtagaactggcgaaacatctggtccgccctggctccttctttgagcaagacttggataccctgccgaactttacgtcggaagggtatggttcaattcgtcgtgtgtatgtttacggcgaagaagaccagatctttagccgcgattttcagttatggcaaattaataattataagcctgataaagtgtactgtgtaccgagtgctgaccacaagattcagatcagcaaagtcaacgagctggcccagattctccaagaagttgcaaactctgcgagtgatcttcttgcagtggct

SEQ ID NO: 654 - protein, 263 aa, synthetic construct
  REGION 1..263: note = Round 2 (Selectivity)
MVSAHFILIHSICHGAWIWYKLIPLLQSAGHNVTAIDLWASGIDPRQLEQIGTWEQYSEPLFTLIESIPEGKKVILVGESGGGINIALAAEKYPEKVSALVFHNALMPDIDHSPAFVYKKTSEVFTDWKDSIFSNYTYGNDTVTAVELGDRTLAENIFSNSPIEDVELAKHLVRPGSFFEQDLDTLPNFTSEGYGSIRRVYVYGEEDQIFSRDFQLWQINNYKPDKVYCVPSADHKIQISKVNELAQILQEVANSASDLLAVA

SEQ ID NO: 655 - DNA, 789 bp, synthetic construct
  misc_feature 1..789: note = Round 2 (Selectivity)
  source 1..789: mol_type = other DNA
atggttagtgcgcattttattctgatccacagtatttgccatggcgcctggctctggtataaactgatcccgttattacagtctgcaggtcataacgctacggcgattgatcttgtggctagcgggatcgaccctcgccaactggaacagattggcacatgggagcagtactcagaaccattgttcaccctgatcgaatcgattccggaaggtaagaaagtcattctggtaggagaatccggtggcggcatcaatattgcactggccgcggagaaatatccggagaaagtgagcgccctcgtctttcacaacgcacttatgcccgatatcgatcacagtccagcgttcgtgtacaagaaatttagcgaagttttcactgactggaaagattcgatcttcagcaattatacctacggtaacgacacggttaccgcggtggaattgggagatcgtactctggccgagaacatcttctccaattctccgattgaagatgtagaactggcgaaacatcaggtccgcaaaggctccttctttgagcaagacttggataccctgccgaactttacgtcggaagggtatggttcaattcgtcgtgtgtatgtttacggcgaagaagaccagatctttagccgcgattttcagttatggcaaattaataattataagcctgataaagtgtactgtgtaccgagtgctgaccacaagattcagatcagcaaagtcaacgagctggcccagattctccaagaagttgcaaactctgcgagtgatcttcttgcagtggct

SEQ ID NO: 656 - protein, 263 aa, synthetic construct
  REGION 1..263: note = Round 2 (Selectivity)
MVSAHFILIHSICHGAWLWYKLIPLLQSAGHNATAIDLVASGIDPRQLEQIGTWEQYSEPLFTLIESIPEGKKVILVGESGGGINIALAAEKYPEKVSALVFHNALMPDIDHSPAFVYKKFSEVFTDWKDSIFSNYTYGNDTVTAVELGDRTLAENIFSNSPIEDVELAKHQVRKGSFFEQDLDTLPNFTSEGYGSIRRVYVYGEEDQIFSRDFQLWQINNYKPDKVYCVPSADHKIQISKVNELAQILQEVANSASDLLAVA

SEQ ID NO: 657 - DNA, 789 bp, synthetic construct
  misc_feature 1..789: note = Round 2 (Selectivity)
  source 1..789: mol_type = other DNA
atggttagtgcgcattttattctgatccacagtatttgccatggcgcctggtgctggtataaactgatcccgttattacagtctgcaggtcataacgttacggcgattgatcttgtggctagcgggatcgaccctcgccaactggaacagattggcacatgggagcagtactcagaaccattgttcaccctgatcgaatcgattccggaaggtaagaaagtcattctggtaggagaatccggtggcggcatcaatattgcactggccgcggagaaatatccggagaaagtgagcgccctcgtctttcacaacgcacttatgcccgatatcgatcacagtccagcgttcgtgctgaagaaatggagcgaagttttcactgactggaaagattcgatcttcagcaattatacctacggtaacgacacggttaccgcggtggaattgggagatcgtactctggccgagaacatcttctccaattctccgattgaagatgtagaactggcgaaacatctggtccgcaaaggctccttctttgagcaagacttggataccctgccgaactttacgtcggaagggtatggttcaattcgtcgtgtgtatgtttacggcgaagaagaccagatctttagccgcgattttcagttatggcaaattaataattataagcctgataaagtgtactgtgtaccgagtgctgaccacaagattcagatcagcaaagtcaacgagctggcccagattctccaagaagttgcaaactctgcgagtgatcttcttgcagtggct

SEQ ID NO: 658 - protein, 263 aa, synthetic construct
  REGION 1..263: note = Round 2 (Selectivity)
MVSAHFILIHSICHGAWCWYKLIPLLQSAGHNVTAIDLVASGIDPRQLEQIGTWEQYSEPLFTLIESIPEGKKVILVGESGGGINIALAAEKYPEKVSALVFHNALMPDIDHSPAFVLKKWSEVFTDWKDSIFSNYTYGNDTVTAVELGDRTLAENIFSNSPIEDVELAKHLVRKGSFFEQDLDTLPNFTSEGYGSIRRVYVYGEEDQIFSRDFQLWQINNYKPDKVYCVPSADHKIQISKVNELAQILQEVANSASDLLAVA

SEQ ID NO: 659 - DNA, 789 bp, synthetic construct
  misc_feature 1..789: note = Round 2 (Selectivity)
  source 1..789: mol_type = other DNA
atggttagtgcgcattttattctgatccacagtatttgccatggcgcctggctctggcgtaaactgatcccgttattacagtctgcaggtcataacgctacggcgattgatcttgtggctagcgggatcgaccctcgccaactggaacagattggcacatgggagcagtactcagaaccattgttcaccctgatcgaatcgattccggaaggtaagaaagtcattctggtaggagaatccggtggcggcatcaatattgcactggccgcggagaaatatccggagaaagtgagcgccctcgtctttcacaacgcacttatgcccgatatcgatcacagtccagcgttcgtgtacaagaaatttagcgaagttttcactgactggaaagattcgatcttcagcaattatacctacggtaacgacacggttaccgcggtggaattgggagatcgtactctggccgagaacatcttctccaattctccgattgaagatgtagaactggcgaaacatctggtccgcaaaggctccttctttgagcaagacttggataccctgccgaactttacgtcggaagggtatggttcaattcgtcgtgtgtatgtttacggcgaagaagaccagatctttagccgcgattttcagttatggcaaattaataattataagcctgataaagtgtactgtgtaccgagtgctgaccacaagattcagatcagcaaagtcaacgagctggcccagattctccaagaagttgcaaactctgcgagtgatcttcttgcagtggct

SEQ ID NO: 660 - protein, 263 aa, synthetic construct
  REGION 1..263: note = Round 2 (Selectivity)
MVSAHFILIHSICHGAWLWRKLIPLLQSAGHNATAIDLVASGIDPRQLEQIGTWEQYSEPLFTLIESIPEGKKVILVGESGGGINIALAAEKYPEKVSALVFHNALMPDIDHSPAFVYKKFSEVFTDWKDSIFSNYTYGNDTVTAVELGDRTLAENIFSNSPIEDVELAKHLVRKGSFFEQDLDTLPNFTSEGYGSIRRVYVYGEEDQIFSRDFQLWQINNYKPDKVYCVPSADHKIQISKVNELAQILQEVANSASDLLAVA

SEQ ID NO: 661 - DNA, 789 bp, synthetic construct
  misc_feature 1..789: note = Round 2 (Selectivity)
  source 1..789: mol_type = other DNA
atggttagtgcgcattttattctgatccacagtatttgccatggcgcctggctctggtataaactgatcccgttattacagtctgcaggtcataacgttacggcgattgatctttgggctagcgggatcgaccctcgccaactggaacagattggcacatgggagcagtactcagaaccattgttcaccctgatcgaatcgattccggaaggtaagaatgtcattctggtaggagaatccggtggcggcatcaatattgcactggccgcggagaaatatccggagaaagtgagcgccctcgtctttcacaacgcacttatgcccgatatcgatcacagtccagcgttcgtgtataagaaatatagcgaagttttcactgactggaaagattcgatcttcagcaattatacctacggtaacgacacggttaccgcggtggaattgggagatcgtactctggccgagaacatcttctccaattctccgattgaagatgtagaactggcgaaacatctggtccgcaaaggctccttctttgagcaagacttggataccctgccgaactttacgtcggaagggtatggttcagtccgtcgtgtgtatgtttacggcgaagaagaccagatctttagccgcgattttcagttatggcaaattaataattataagcctgataaagtgtactgtgtcccgagtgctgaccacaagattcagatcagcaaagtcaacgagctggcccagattctccaagaagttgcaaactctgcgagtgatcttcttgcagtggct

SEQ ID NO: 662 - protein, 263 aa, synthetic construct
  REGION 1..263: note = Round 2 (Selectivity)
MVSAHFILIHSICHGAWLWYKLIPLLQSAGHNVTAIDLWASGIDPRQLEQIGTWEQYSEPLFTLIESIPEGKNVILVGESGGGINIALAAEKYPEKVSALVFHNALMPDIDHSPAFVYKKYSEVFTDWKDSIFSNYTYGNDTVTAVELGDRTLAENIFSNSPIEDVELAKHLVRKGSFFEQDLDTLPNFTSEGYGSVRRVYVYGEEDQIFSRDFQLWQINNYKPDKVYCVPSADHKIQISKVNELAQILQEVANSASDLLAVA

SEQ ID NO: 663 - DNA, 789 bp, synthetic construct
  misc_feature 1..789: note = Round 2 (Selectivity)
  source 1..789: mol_type = other DNA
atggttagtgcgcattttattctgatccacagtatttgccatggcgcctggatctggtataaactgatcccgttattacagtctgcaggtcataacgctacggcgattgatcttgtggctagcgggatcgaccctcgccaactggaacagattggcacatgggagcagtactcagaaccattgttcaccctgatcgaatcgattccggaaggtaagaaagtcattctggtaggagaatccggtggcggcatcaatattgcactggccgcggagaaatatccggagaaagtgagcgccctcgtctttcacaacgcacttatgcccgatatcgatcacagtccagcgttcgtgctgaagaaatatagcgaagttttcactgactggaaagattcgatcttcagcaattatacctacggtaacgacacggttaccgcggtggaattgggagatcgtactctggccgagaacatcttctccaattctccgattgaagatgtagaactggcgaaacatctggtccgcaaaggctccttctttgagcaagacttggataccctgccgaactttacgtcggaagggtatggttcaattcgtcgtgtgtatgtttacggcgaagaagaccagatctttagccgcgattttcagttatggcaaattaataattataagcctgataaagtgtactgtgtaccgagtgctgaccacaagattcagatcagcaaagtcaacgagctggcccagattctccaagaagttgcaaactctgcgagtgatcttcttgcagtggct

SEQ ID NO: 664 - protein, 263 aa, synthetic construct
  REGION 1..263: note = Round 2 (Selectivity)
MVSAHFILIHSICHGAWIWYKLIPLLQSAGHNATAIDLVASGIDPRQLEQIGTWEQYSEPLFTLIESIPEGKKVILVGESGGGINIALAAEKYPEKVSALVFHNALMPDIDHSPAFVLKKYSEVFTDWKDSIFSNYTYGNDTVTAVELGDRTLAENIFSNSPIEDVELAKHLVRKGSFFEQDLDTLPNFTSEGYGSIRRVYVYGEEDQIFSRDFQLWQINNYKPDKVYCVPSADHKIQISKVNELAQILQEVANSASDLLAVA

SEQ ID NO: 665 - DNA, 789 bp, synthetic construct
  misc_feature 1..789: note = Round 2 (Selectivity)
  source 1..789: mol_type = other DNA
atggttagtgcgcattttattctgatccacagtatttgccatggcgcctggctctggtataaactgatcccgttattacagtctgcaggtcataacgctacggcgattgatctttgggctagcgggatcaaccctcgccaactggaacagattggcacatgggagcagtactcagaaccattgttcaccctgatcgaatcgattccggaaggtaagaaagtcattctggtaggagaatccggtggcggcatcaatattgcactggccgcggagaaatatccggagaaagtgagcgccctcgtctttcacaacgcacttatgcccgatatcgatcacagtccagcgttcgtgctgaagaaatggagcgaagttttcactgactggaaagattcgatcttcagcaattatacctacggtaacgacacggttaccgcggtggaattgggagatcgtactctggccgagaacatcttctccaattctccgattgaagatgtagaactggcgaaacatctggtccgccctggctccttctttgagcaagacttggataccctgccgaactttacgtcggaagggtatggttcaatccgtcgtgtgtatgtttacggcgaagaagaccagatcatgagccgcgattttcagttatggcaaattaataattataagcctgataaagtgtactgtgtaccgagtgctgaccacaagattcagatcagcaaagtcaacgagctggcccagattctccaagaagttgcaaactctgcgagtgatcttcttgcagtggct

SEQ ID NO: 666 - protein, 263 aa, synthetic construct
  REGION 1..263: note = Round 2 (Selectivity)
MVSAHFILIHSICHGAWLWYKLIPLLQSAGHNATAIDLWASGINPRQLEQIGTWEQYSEPLFTLIESIPEGKKVILVGESGGGINIALAAEKYPEKVSALVFHNALMPDIDHSPAFVLKKWSEVFTDWKDSIFSNYTYGNDTVTAVELGDRTLAENIFSNSPIEDVELAKHLVRPGSFFEQDLDTLPNFTSEGYGSIRRVYVYGEEDQIMSRDFQLWQINNYKPDKVYCVPSADHKIQISKVNELAQILQEVANSASDLLAVA

SEQ ID NO: 667 - DNA, 789 bp, synthetic construct
  misc_feature 1..789: note = Round 2 (Selectivity)
  source 1..789: mol_type = other DNA
atggttagtgcgcattttattctgatccacagtatttgccatggcgcctggctctggtataaactgatcccgttattacagtctgcaggtcataacgctacggcgattgatcttgtggctagcgggatcgaccctcgccaactggaacagattggcacatgggagcagtactcagaaccattgttcaccctgatcgaatcgattccggaaggtaagaaagtcattctggtaggagaatccggtggcggcatcaatattgcactggccgcggagaaatatccggagaaagtgagcgccctcgtctttcacaacgcacttatgcccgatatcgatcacagtccagcgttcgtgtacaagaaatttagcgaagttttcactgactggaaagattcgatcttcagcaattatacctacggtaacgacacggttaccgcggtggaattgggagatcgtactctggccgagaacatcttctccaattctccgattgaagatgtagaactggcgaaacatgaggtccgcaaaggctccttctttgagcaagacttggataccctgccgaactttacgtcggaagggtatggttcaattcgtcgtgtgtatgtttacggcgaagaagaccagatctttagccgcgattttcagttatggcaaattaataattataagcctgataaagtgtactgtgtaccgagtgctgaccacaagattcagatcagcaaagtcaacgagctggcccagattctccaagaagttgcaaactctgcgagtgatcttcttgcagtggct

SEQ ID NO: 668 - protein, 263 aa, synthetic construct
  REGION 1..263: note = Round 2 (Selectivity)
MVSAHFILIHSICHGAWLWYKLIPLLQSAGHNATAIDLVASGIDPRQLEQIGTWEQYSEPLFTLIESIPEGKKVILVGESGGGINIALAAEKYPEKVSALVFHNALMPDIDHSPAFVYKKFSEVFTDWKDSIFSNYTYGNDTVTAVELGDRTLAENIFSNSPIEDVELAKHEVRKGSFFEQDLDTLPNFTSEGYGSIRRVYVYGEEDQIFSRDFQLWQINNYKPDKVYCVPSADHKIQISKVNELAQILQEVANSASDLLAVA

SEQ ID NO: 669 - DNA, 789 bp, synthetic construct
  misc_feature 1..789: note = Round 2 (Selectivity)
  source 1..789: mol_type = other DNA
atggttagtgcgcattttattctgatccacagtatttgccatggcgcctggctctggtataaactgatcccgttattacagtctgcaggtcataacgctacggcgattgatctttgggctagcgggatcgaccctcgccaactggaacagattggcacatgggagcagtactcagaaccattgttcaccctgatcgaatcgattccggaaggtaagaaagtcattctggtaggagaatccggtggcggcatcaatattgcactggccgcggagaaatatccggagaaagtgagcgccctcgtctttcacaacgcacttatgcccgatatcgatcacagtccagcgttcgtgctgaagaaatggagcgaagttttcactgactggaaagattcgatcttcagcaattatacctacggtaacgacacggttaccgcggtggaattgggagatcgtactctggccgagaacatcttctccaattctccgattgaagatgtagaactggcgaaacatctggtccgcaagggctccttctttgagcaagacttggataccctgccgaactttacgtcggaagggtatggttcaatccgtcgtgtgtatgtttacggcgaagaagaccagatcatgagccgcgattttcagttatggcaaattaataattataagcctgataaagtgtactgtgtcccgagtgctgaccacaagattcagatcagcaaagtcaacgagctggcccagattctccaagaagttgcaaactctgcgagtgatcttcttgcagtggct

SEQ ID NO: 670 - protein, 263 aa, synthetic construct
  REGION 1..263: note = Round 2 (Selectivity)
MVSAHFILIHSICHGAWLWYKLIPLLQSAGHNATAIDLWASGIDPRQLEQIGTWEQYSEPLFTLIESIPEGKKVILVGESGGGINIALAAEKYPEKVSALVFHNALMPDIDHSPAFVLKKWSEVFTDWKDSIFSNYTYGNDTVTAVELGDRTLAENIFSNSPIEDVELAKHLVRKGSFFEQDLDTLPNFTSEGYGSIRRVYVYGEEDQIMSRDFQLWQINNYKPDKVYCVPSADHKIQISKVNELAQILQEVANSASDLLAVA

SEQ ID NO: 671 - DNA, 789 bp, synthetic construct
  misc_feature 1..789: note = Round 2 (Selectivity)
  source 1..789: mol_type = other DNA
atggttagtgcgcattttattctgatccacagtatttgccatggcgcctggatctggtataaactgatcccgttattacagtctgcaggtcataacgctacggcgattgatcttgtggctagcgggatcgaccctcgccaactggaacagattggcacatgggagcagtactcagaaccattgttcaccctgatcgaatcgattccggaaggtaagaaagtcattctggtaggagaatccggtggcggcatcaatattgcactggccgcggagaaatatccggagaaagtgagcgccctcgtctttcacaacgcacttatgcccgatatcgatcacagtccagcgttcgtgtataagaaatatagcgaagttttcactgactggaaagattcgatcttcagcaattatacctacggtaacgacacggttaccgcggtggaattgggagatcgtactctggccgagaacatcttctccaattctccgattgaagatgtagaactggcgaaacatctggtccgcaaaggctccttctttgagcaagacttggataccctgccgaactttacgtcggaagggtatggttcaattcgtcgtgtgtatgtttacggcgaagaagaccagatcatgagccgcgattttcagttatggcaaattaataattataagcctgataaagtgtactgtgtaccgagtgctgaccacaagattcagatcagcaaagtcaacgagctggcccagattctccaagaagttgcaaactctgcgagtgatcttcttgcagtggct

SEQ ID NO: 672 - protein, 263 aa, synthetic construct
  REGION 1..263: note = Round 2 (Selectivity)
MVSAHFILIHSICHGAWIWYKLIPLLQSAGHNATAIDLVASGIDPRQLEQIGTWEQYSEPLFTLIESIPEGKKVILVGESGGGINIALAAEKYPEKVSALVFHNALMPDIDHSPAFVYKKYSEVFTDWKDSIFSNYTYGNDTVTAVELGDRTLAENIFSNSPIEDVELAKHLVRKGSFFEQDLDTLPNFTSEGYGSIRRVYVYGEEDQIMSRDFQLWQINNYKPDKVYCVPSADHKIQISKVNELAQILQEVANSASDLLAVA

SEQ ID NO: 673 - DNA, 789 bp, synthetic construct
  misc_feature 1..789: note = Round 2 (Selectivity)
  source 1..789: mol_type = other DNA
atggttagtgcgcattttattctgattcacagtattggtcatggcgcctggctctggtataaactgatcccgttattacagtctgcaggtcataacgctacggcgattgatctttgggctagcgggatcgaccctcgccaactggaacagattggcacatgggagcagtactcagaaccattgttcaccctgatcgaatcgatcccggaaggtgaaaaagtcattctggtaggagaatccggtggcggcatcaatattgcactggccgcggagaaatatccggagaaaattagcgccctcgtctttcacaacgcacttatgcccgatatcgatcacagtccagcgttcgtgtacaagaaatttactgaagttttcactgactggaaagattcgatcttcgataattatacctacggtaacgacacggttaccgcggtggaattgggagatcgtactctggccgagaacatcttctccaattctccgattgaagatgtagaactggcgaaacatctggtccgcaaaggctccttctttgagcaagacttggataccctgccgaactttacgtcggaagggtatggttcaattcgtcgtgtgtatgtttacggcgaagaagaccagatctttagccgcgattttcagttatggcaaattaataattatccgcctgataaagtgtactgtgtaccgagtgctgaccacaagattcagatcagcaaagtcaacgagctggcccagattctccaagaagttgcaaactctgcgagtgatcttcttgcagtggct

SEQ ID NO: 674 - protein, 263 aa, synthetic construct
  REGION 1..263: note = Round 2 (Selectivity)
MVSAHFILIHSIGHGAWLWYKLIPLLQSAGHNATAIDLWASGIDPRQLEQIGTWEQYSEPLFTLIESIPEGEKVILVGESGGGINIALAAEKYPEKISALVFHNALMPDIDHSPAFVYKKFTEVFTDWKDSIFDNYTYGNDTVTAVELGDRTLAENIFSNSPIEDVELAKHLVRKGSFFEQDLDTLPNFTSEGYGSIRRVYVYGEEDQIFSRDFQLWQINNYPPDKVYCVPSADHKIQISKVNELAQILQEVANSASDLLAVA

SEQ ID NO: 675 - DNA, 789 bp, synthetic construct
  misc_feature 1..789: note = Round 2 (Selectivity)
  source 1..789: mol_type = other DNA
atggttagtgcgcattttattctgatccacagtatttgccatggcgcctggtgctggtataaactgatcccgttattacagtctgcaggtcataacgctacggcgattgatcttgtggctagcgggatcgaccctcgccaactggaacagattggcacatgggagcagtactcagaaccattgttcaccctgatcgaatcgattccggaaggtaagaaagtcattctggtaggagaatccggtggcggcatcaatattgcactggccgcggagaaatatccggagaaagtgagcgccctcgtctttcacaacgcacttatgcccgatatcgatcacagtccagcgttcgtgctgaagaaatggagcgaagttttcactgactggaaagattcgatcttcagcaattatacctacggtaacgacacggttaccgcggtggaattgggagatcgtactctggccgagaacatcttctccaattctccgattgaagatgtagaactggcgaaacatctggtccgcaaaggctccttctttgagcaagacttggataccctgccgaactttacgtcggaagggtatggttcaattcgtcgtgtgtatgtttacggcgaagaagaccagatctttagccgcgattttcagttatggcaaattaataattataagcctgataaagtgtactgtgtaccgagtgctgaccacaagattcagatcagcaaagtcaacgagctggcccagattctccaagaagttgcaaactctgcgagtgatcttcttgcagtggct

SEQ ID NO: 676 - protein, 263 aa, synthetic construct
  REGION 1..263: note = Round 2 (Selectivity)
MVSAHFILIHSICHGAWCWYKLIPLLQSAGHNATAIDLVASGIDPRQLEQIGTWEQYSEPLFTLIESIPEGKKVILVGESGGGINIALAAEKYPEKVSALVFHNALMPDIDHSPAFVLKKWSEVFTDWKDSIFSNYTYGNDTVTAVELGDRTLAENIFSNSPIEDVELAKHLVRKGSFFEQDLDTLPNFTSEGYGSIRRVYVYGEEDQIFSRDFQLWQINNYKPDKVYCVPSADHKIQISKVNELAQILQEVANSASDLLAVA

SEQ ID NO: 677 - DNA, 789 bp, synthetic construct
  misc_feature 1..789: note = Round 2 (Selectivity)
  source 1..789: mol_type = other DNA
atggttagtgcgcattttattctggttcacagtattggtcatggcgcctggctctggtataaactgatcccgttattacagtctgcaggtcataacgctacggcgattgatctttgggctagcgggatcgaccctcgccaactggaacagattggcacatgggagcagtactcagaaccattgttcaccctgatcgaatcgattccggaaggtaagaaagtcattctggtaggagaatccggtggcggcatcaatattgcactggccgcggagaaatatccggagaaagtgagcgccctcgtctttcacaacgcacttatgcccgatatcgatcacagtccagcgttcgtgtacaagaaatttagtgaagttttcactgactggaaagattcgatcttcagcaattatacctacggtaacgacacggttaccgcggtggaattgggagatcgtactctggccgagaacatcttctccaattctccgattgaagatgtagaactggcgaaacatctggtccgcaaaggctccttctttgagcaagacttggataccctgccgaactttacgtcggaagggtatggttcaattcgtcgtgtgtatgtttacggcgaagaagaccagatctttagccgcgattttcagttatggcaaattaataattataagcctgataaagtgtactgtgtaccgagtgctgaccacaagattcagattagcaaagtcaacgagctggcccagattctccaagaagttgcaaactctgcgagtgatcttcttgcagtggct

SEQ ID NO: 678 - protein, 263 aa, synthetic construct
  REGION 1..263: note = Round 2 (Selectivity)
MVSAHFILVHSIGHGAWLWYKLIPLLQSAGHNATAIDLWASGIDPRQLEQIGTWEQYSEPLFTLIESIPEGKKVILVGESGGGINIALAAEKYPEKVSALVFHNALMPDIDHSPAFVYKKFSEVFTDWKDSIFSNYTYGNDTVTAVELGDRTLAENIFSNSPIEDVELAKHLVRKGSFFEQDLDTLPNFTSEGYGSIRRVYVYGEEDQIFSRDFQLWQINNYKPDKVYCVPSADHKIQISKVNELAQILQEVANSASDLLAVA

SEQ ID NO: 679 - DNA, 789 bp, synthetic construct
  misc_feature 1..789: note = Round 2 (Selectivity)
  source 1..789: mol_type = other DNA
atggttagtgcgcattttattctgatccacagtatttgccatggcgcctggatctggtataaactgatcccgttattacagtctgcaggtcataacgctacggcgattgatcttgtggctagcgggatcgaccctcgccaactggaacagattggcacatgggagcagtactcagaaccattgttcaccctgatcgaatcgattccggaaggtaagaaagtcattctggtaggagaatccggtggcggcatcaatattgcactggccgcggagaaatatccggagaaagtgagcgccctcgtctttcacaacgcacttatgcccgatatcgatcacagtccagcgttcgtgtataagaaaaccagcgaagttttcactgactggaaagattcgatcttcagcaattatacctacggtaacgacacggttaccgcggtggaattgggagatcgtactctggccgagaacatcttctccaattctccgattgaagatgtagaactggcgaaacatctggtccgccctggctccttctttgagcaagacttggataccctgccgaactttacgtcggaagggtatggttcaattcgtcgtgtgtatgtttacggcgaagaagaccagatctttagccgcgattttcagttatggcaaattaataattataagcctgataaagtgtactgtgtaccgagtgctgaccacaagattcagatcagcaaagtcaacgagctggcccagattctccaagaagttgcaaactctgcgagtgatcttcttgcagtggct

SEQ ID NO: 680 - protein, 263 aa, synthetic construct
  REGION 1..263: note = Round 2 (Selectivity)
MVSAHFILIHSICHGAWIWYKLIPLLQSAGHNATAIDLVASGIDPRQLEQIGTWEQYSEPLFTLIESIPEGKKVILVGESGGGINIALAAEKYPEKVSALVFHNALMPDIDHSPAFVYKKTSEVFTDWKDSIFSNYTYGNDTVTAVELGDRTLAENIFSNSPIEDVELAKHLVRPGSFFEQDLDTLPNFTSEGYGSIRRVYVYGEEDQIFSRDFQLWQINNYKPDKVYCVPSADHKIQISKVNELAQILQEVANSASDLLAVA

SEQ ID NO: 681 - DNA, 789 bp, synthetic construct
  misc_feature 1..789: note = Round 2 (Selectivity)
  source 1..789: mol_type = other DNA
atggttagtgcgcattttattctgatccacagtatttgccatggcgcctggctgtggtataaactgatcccgttattacagtctgcaggtcataacgctacggcgattgatctttgggctagcgggatcgaccctcgccaactggaacagattggcacatgggagcagtactcagaaccattgttcaccctgatcgaatcgattccggaaggtaagaaagtcattctggtaggagaatccggtggcggcatcaatattgcactggccgcggagaaatatccggagaaagtgagcgccctcgtctttcacaacgcacttatgcccgatatcgatcacagtccagcgttcgtgctgaagaaatatagcgaagttttcactgactggaaagattcgatcttcagcaattatacctacggtaacgacacggttaccgcggtggaattgggagatcgtactctggccgagaacatcttctccaattctccgattgaagatgtagaactggcgaaacatctggtccgcaagggctccttctttgagcaagacttggataccctgccgaactttacgtcggaagggtatggttcaattcgtcgtgtgtatgtttacggcgaagaagaccagatcatgagccgcgattttcagttatggcaaattaataattataagcctgataaagtgtactgtgtaccgagtgctgaccacaagattcagatcagcaaagtcaacgagctggcccagattctccaagaagttgcaaactctgcgagtgatcttcttgcagtggct

SEQ ID NO: 682 - protein, 263 aa, synthetic construct
  REGION 1..263: note = Round 2 (Selectivity)
MVSAHFILIHSICHGAWLWYKLIPLLQSAGHNATAIDLWASGIDPRQLEQIGTWEQYSEPLFTLIESIPEGKKVILVGESGGGINIALAAEKYPEKVSALVFHNALMPDIDHSPAFVLKKYSEVFTDWKDSIFSNYTYGNDTVTAVELGDRTLAENIFSNSPIEDVELAKHLVRKGSFFEQDLDTLPNFTSEGYGSIRRVYVYGEEDQIMSRDFQLWQINNYKPDKVYCVPSADHKIQISKVNELAQILQEVANSASDLLAVA

SEQ ID NO: 683 - DNA, 789 bp, synthetic construct
  misc_feature 1..789: note = Round 2 (Selectivity)
  source 1..789: mol_type = other DNA
atggttagtgcgcattttattctgatccacagtatttgccatggcgcctggctctgggggaaactgatcccgttattacagtctgcaggtcataacgctacggcgattgatcttgtggctagcgggatcgaccctcgccaactggaacagattggcacatgggagcagtactcagaaccattgttcaccctgatcgaatcgattccggaaggtaagaaagtcattctggtaggagaatccggtggcggcatcaatattgcactggccgcggagaaatatccggagaaagtgagcgccctcgtctttcacaacgcacttatgcccgatatcgatcacagtccagcgttcgtgtacaagaaatttagcgaagttttcactgactggaaagattcgatcttcagcaattatacctacggtaacgacacggttaccgcggtggaattgggagatcgtactctggccgagaacatcttctccaattctccgattgaagatgtagaactggcgaaacatctggtccgcaaaggctccttctttgagcaagacttggataccctgccgaactttacgtcggaagggtatggttcaattcgtcgtgtgtatgtttacggcgaagaagaccagatctttagccgcgattttcagttatggcaaattaataattataagcctgataaagtgtactgtgtaccgagtgctgaccacaagattcagatcagcaaagtcaacgagctggcccagattctccaagaagttgcaaactctgcgagtgatcttcttgcagtggct

SEQ ID NO: 684 - protein, 263 aa, synthetic construct
  REGION 1..263: note = Round 2 (Selectivity)
MVSAHFILIHSICHGAWLWGKLIPLLQSAGHNATAIDLVASGIDPRQLEQIGTWEQYSEPLFTLIESIPEGKKVILVGESGGGINIALAAEKYPEKVSALVFHNALMPDIDHSPAFVYKKFSEVFTDWKDSIFSNYTYGNDTVTAVELGDRTLAENIFSNSPIEDVELAKHLVRKGSFFEQDLDTLPNFTSEGYGSIRRVYVYGEEDQIFSRDFQLWQINNYKPDKVYCVPSADHKIQISKVNELAQILQEVANSASDLLAVA

SEQ ID NO: 685 - DNA, 789 bp, synthetic construct
  misc_feature 1..789: note = Round 2 (Selectivity)
  source 1..789: mol_type = other DNA
atggttagtgcgcattttattctgatccacagtatttgccatggcgcctggctctggtataaactgatcccgttattacagtctgcaggtcataacgttacggcgattgatctttgggctagcgggatcgaccctcgccaactggaacagattggcacatgggagcagtactcagaaccattgttcaccctgatcgaatcgattccggaaggtaagaaagtcattctggtaggagaatccggtggcggcatcaatattgcactggccgcggagaaatatccggagaaagtgagcgccctcgtctttcacaacgcacttatgcccgatatcgatcacagtccagcgttcgtgtataagaaatggagcgaagttttcactgactggaaagattcgatcttcagcaattatacctacggtaacgacacggttaccgcggtggaattgggagatcgtactctggccgagaacatcttctccaattctccgattgaagatgtagaactggcgaaacatctggtccgcaaaggctccttctttgagcaagacttggataccctgccgaactttacgtcggaagggtatggttcaattcgtcgtgtgtatgtttacggcgaagaagaccagatcatgagccgcgattttcagttatggcaaattaataattataagcctgataaagtgtactgtatcccgagtgctgaccacaagattcagatcagcaaagtcaacgagctggcccagattctccaagaagttgcaaactctgcgagtgatcttcttgcagtggct

SEQ ID NO: 686 - protein, 263 aa, synthetic construct
  REGION 1..263: note = Round 2 (Selectivity)
MVSAHFILIHSICHGAWLWYKLIPLLQSAGHNVTAIDLWASGIDPRQLEQIGTWEQYSEPLFTLIESIPEGKKVILVGESGGGINIALAAEKYPEKVSALVFHNALMPDIDHSPAFVYKKWSEVFTDWKDSIFSNYTYGNDTVTAVELGDRTLAENIFSNSPIEDVELAKHLVRKGSFFEQDLDTLPNFTSEGYGSIRRVYVYGEEDQIMSRDFQLWQINNYKPDKVYCIPSADHKIQISKVNELAQILQEVANSASDLLAVA

SEQ ID NO: 687 - DNA, 789 bp, synthetic construct
  misc_feature 1..789: note = Round 2 (Selectivity)
  source 1..789: mol_type = other DNA
atggttagtgcgcattttattctgattcacagtattggtcatggcgcctggctctggtataaactgatcccgttattacagtctgcaggtcataacgctacggcgattgatcttgtggctagcgggatcgaccctcgccaactggaacagattggcacatgggagcagtactcagaaccattgttcaccctgatcgaatcgctgccggaaggtaaaaaagtcattctggtaggagaatccggtggcggcatcaatattgcactggccgcggagaaatatccggagaaagtgagcgccctcgtctttcacaacgcacttatgcccgatatcgatcacagtccagcgttcgtgtacaagaaatttagcgaagttttcactgactggaaagattcgatcttcagcaattatacctacggtaacgacacggttaccgcggtggaattgggagatcgtactctggccgagaacatcttctccaattctccgattgaagatgtagaactggcgaaacatctggtccgcaaaggctccttctttgagcaagacttggataccctgccgaactttacgtcggaagggtatggttcaattcgtcgtgtgtatgtttacggcgaagaagaccagatctttagccgcgattttcagttatggcaaattaataattataagcctgataaagtgtactgtgtaccgagtgctgaccacaagattcagattagcaaagtcaacgagctggcccagattctccaagaagttgcaaactctgcgagtgatcttcttgcagtggct

SEQ ID NO: 688 - protein, 263 aa, synthetic construct
  REGION 1..263: note = Round 2 (Selectivity)
MVSAHFILIHSIGHGAWLWYKLIPLLQSAGHNATAIDLVASGIDPRQLEQIGTWEQYSEPLFTLIESLPEGKKVILVGESGGGINIALAAEKYPEKVSALVFHNALMPDIDHSPAFVYKKFSEVFTDWKDSIFSNYTYGNDTVTAVELGDRTLAENIFSNSPIEDVELAKHLVRKGSFFEQDLDTLPNFTSEGYGSIRRVYVYGEEDQIFSRDFQLWQINNYKPDKVYCVPSADHKIQISKVNELAQILQEVANSASDLLAVA

SEQ ID NO: 689 - DNA, 789 bp, synthetic construct
  misc_feature 1..789: note = Round 2 (Selectivity)
  source 1..789: mol_type = other DNA
atggttagtgcgcattttattctgatccacagtatttgccatggcgcctggctctggtataaactgatcccgttattacagtctgcaggtcataacgttacggcgattgatctttgggctagcgggatcaaccctcgccaactggaacagattggcacatgggagcagtactcagaaccattgttcaccctgatcgaatcgattccggaaggtaagaaagtcattctggtaggagaatccggtggcggcatcaatattgcactggccgcggagaaatatccggagaaagtgagcgccctcgtctttcacaacgcacttatgcccgatatcgatcacagtccagcgttcgtgtataagaaagttagcgaagttttcactgactggaaagattcgatcttcagcaattatacctacggtaacgacacggttaccgcggtggaattgggagatcgtactctggccgagaacatcttctccaattctccgattgaagatgtagaactggcgaaacatctggtccgcaaaggctccttctttgagcaagacttggataccctgccgaactttacgtcggaagggtatggttcaattcgtcgtgtgtatgtttacggcgaagaagaccagatctttagccgcgattttcagttatggcaaattaataattataagcctgataaagtgtactgtgtcccgagtgctgaccacaagattcagatcagcaaagtcaacgagctggcccagattctccaagaagttgcaaactctgcgagtgatcttcttgcagtggct

SEQ ID NO: 690 - protein, 263 aa, synthetic construct
  REGION 1..263: note = Round 2 (Selectivity)
MVSAHFILIHSICHGAWLWYKLIPLLQSAGHNVTAIDLWASGINPRQLEQIGTWEQYSEPLFTLIESIPEGKKVILVGESGGGINIALAAEKYPEKVSALVFHNALMPDIDHSPAFVYKKVSEVFTDWKDSIFSNYTYGNDTVTAVELGDRTLAENIFSNSPIEDVELAKHLVRKGSFFEQDLDTLPNFTSEGYGSIRRVYVYGEEDQIFSRDFQLWQINNYKPDKVYCVPSADHKIQISKVNELAQILQEVANSASDLLAVA

SEQ ID NO: 691 - DNA, 789 bp, synthetic construct
  misc_feature 1..789: note = Round 2 (Selectivity)
  source 1..789: mol_type = other DNA
atggttagtgcgcattttattctgatccacagtatttgccatggcgcctggtgctggtataaactgatcccgttattacagtctgcaggtcataacgctacggcgattgatcttgtggctagcgggatcgaccctcgccaactggaacagattggcacatgggagcagtactcagaaccattgttcaccctgatcgaatcgattccggaaggtaagaaagtcattctggtaggagaatccggtggcggcatcaatattgcactggccgcggagaaatatccggagaaagtgagcgccctcgtctttcacaacgcacttatgcccgatatcgatcacagtccagcgttcgtgtataagaaatggagcgaagttttcactgactggaaagattcgatcttcagcaattatacctacggtaacgacacggttaccgcggtggaattgggagatcgtactctggccgagaacatcttctccaattctccgattgaagatgtagaactggcgaaacatctggtccgcaagggctccttctttgagcaagacttggataccctgccgaactttacgtcggaagggtatggttcaattcgtcgtgtgtatgtttacggcgaagaagaccagatctttagccgcgattttcagttatggcaaattaataattataagcctgataaagtgtactgtgtaccgagtgctgaccacaagattcagatcagcaaagtcaacgagctggcccagattctccaagaagttgcaaactctgcgagtgatcttcttgcagtggct

SEQ ID NO: 692 - protein, 263 aa, synthetic construct
  REGION 1..263: note = Round 2 (Selectivity)
MVSAHFILIHSICHGAWCWYKLIPLLQSAGHNATAIDLVASGIDPRQLEQIGTWEQYSEPLFTLIESIPEGKKVILVGESGGGINIALAAEKYPEKVSALVFHNALMPDIDHSPAFVYKKWSEVFTDWKDSIFSNYTYGNDTVTAVELGDRTLAENIFSNSPIEDVELAKHLVRKGSFFEQDLDTLPNFTSEGYGSIRRVYVYGEEDQIFSRDFQLWQINNYKPDKVYCVPSADHKIQISKVNELAQILQEVANSASDLLAVA

SEQ ID NO: 693 - DNA, 789 bp, synthetic construct
  misc_feature 1..789: note = Round 2 (Selectivity)
  source 1..789: mol_type = other DNA
atggttagtgcgcattttattctgatccacagtatttgccatggcgcctggatctggtataaactgatcccgttattacagtctgcaggtcataacgctacggcgattgatcttgtggctagcgggatcgaccctcgccaactggaacagattggcacatgggagcagtactcagaaccattgttcaccctgatcgaatcgattccggaaggtaagaaagtcattctggtaggagaatccggtggcggcatcaatattgcactggccgcggagaaatatccggagaaagtgagcgccctcgtctttcacaacgcacttatgcccgatatcgatcacagtccagcgttcgtgctgaagaaatggagcgaagttttcactgactggaaagattcgatcttcagcaattatacctacggtaacgacacggttaccgcggtggaattgggagatcgtactctggccgagaacatcttctccaattctccgattgaagatgtagaactggcgaaacatctggtccgcaaaggctccttctttgagcaagacttggataccctgccgaactttacgtcggaagggtatggttcaattcgtcgtgtgtatgtttacggcgaagaagaccagatctttagccgcgattttcagttatggcaaattaataattataagcctgataaagtgtactgtgtaccgagtgctgaccacaagattcagatcagcaaagtcaacgagctggcccagattctccaagaagttgcaaactctgcgagtgatcttcttgcagtggct

SEQ ID NO: 694 - protein, 263 aa, synthetic construct
  REGION 1..263: note = Round 2 (Selectivity)
MVSAHFILIHSICHGAWIWYKLIPLLQSAGHNATAIDLVASGIDPRQLEQIGTWEQYSEPLFTLIESIPEGKKVILVGESGGGINIALAAEKYPEKVSALVFHNALMPDIDHSPAFVLKKWSEVFTDWKDSIFSNYTYGNDTVTAVELGDRTLAENIFSNSPIEDVELAKHLVRKGSFFEQDLDTLPNFTSEGYGSIRRVYVYGEEDQIFSRDFQLWQINNYKPDKVYCVPSADHKIQISKVNELAQILQEVANSASDLLAVA

SEQ ID NO: 695 - DNA, 789 bp, synthetic construct
  misc_feature 1..789: note = Round 2 (Selectivity)
  source 1..789: mol_type = other DNA
atggttagtgcgcattttattctgattcacagtattggtcatggcgcctggctctggtataaactgatcccgttattacagtctgcaggtcataacgctacggcgattgatctttgggctagcgggatcgaccctcgccaactggaacagattggcacatgggagcagtactcagaaccattgttcaccctgatcgaatcgattccggaaggtaagaaagtcattctggtaggagaatccggtggcggcatcaatattgcactggccgcggagaaatatccggagaaagtgagcgccctcgtctttcacaacgcacttatgcccgatatcgatcacagtccagcgttcgtgtacaagaaatttagcgaagttttcactgactggaaagattcgatcttcagcaattatacctacggtaacgacacggttaccgcggtggaattgggagatcgtactctggccgagaacatcttctccaattctccgattgaagatgtagaactggcgaaacatctggtccgcaaaggctccttctttgagcaagacttggataccctgccgaactttacgtcggaagggtatggttcaattcgtcgtgtgtatgtttacggcgaagaagaccagatctttagccgcgattttcagttatggcaaattaataattataagcctgataaagtgtactgtgtaccgagtgctgaccacaagattcagatcagcaaagtcaacgagctggcccagattctccaagaagttgcaaactctgcgagtgatcttcttgcagtggct

SEQ ID NO: 696 - protein, 263 aa, synthetic construct
  REGION 1..263: note = Round 2 (Selectivity)
MVSAHFILIHSIGHGAWLWYKLIPLLQSAGHNATAIDLWASGIDPRQLEQIGTWEQYSEPLFTLIESIPEGKKVILVGESGGGINIALAAEKYPEKVSALVFHNALMPDIDHSPAFVYKKFSEVFTDWKDSIFSNYTYGNDTVTAVELGDRTLAENIFSNSPIEDVELAKHLVRKGSFFEQDLDTLPNFTSEGYGSIRRVYVYGEEDQIFSRDFQLWQINNYKPDKVYCVPSADHKIQISKVNELAQILQEVANSASDLLAVA

SEQ ID NO: 697 - DNA, 789 bp, synthetic construct
  misc_feature 1..789: note = Round 2 (Selectivity)
  source 1..789: mol_type = other DNA
atggttagtgcgcattttattctggttcacagtattggtcatggcgcctggctctggtataaactgatcccgttattacagtctgcaggtcataacgctacggcgattgatcttgtagctagcgggatcgaccctcgccaactggaacagattggcacatgggagcagtactcagaaccattgttcaccctgatcgaatcgctgccggaaggtgaaaaagtcattctggtaggagaatccggtggcggcatcaatattgcactggccgcggagaaatatccggagaaaattagcgccctcgtctttcacaacgcacttatgcccgatatcgatcacagtccagcgttcgtgtacaagaaatttagcgaagttttcactgactggaaagattcgatcttcagcaattatacctacggtaacgacacggttaccgcggtggaattgggagatcgtactctggccgagaacatcttctccaattctccgattgaagatgtagaactggcgaaacatctggtccgcaaaggctccttctttgagcaagacttggataccctgccgaactttacgtcggaagggtatggttcaattcgtcgtgtgtatgtttacggcgaagaagaccagatctttagccgcgattttcagttatggcaaattaataattataagcctgataaagtgtactgtgtaccgagtgctgaccacaagattcagtttagcaaagtcaacgagctggcccagattctccaagaagttgcaaactctgcgagtgatcttcttgcagtggct

SEQ ID NO: 698 - protein, 263 aa, synthetic construct
  REGION 1..263: note = Round 2 (Selectivity)
MVSAHFILVHSIGHGAWLWYKLIPLLQSAGHNATAIDLVASGIDPRQLEQIGTWEQYSEPLFTLIESLPEGEKVILVGESGGGINIALAAEKYPEKISALVFHNALMPDIDHSPAFVYKKFSEVFTDWKDSIFSNYTYGNDTVTAVELGDRTLAENIFSNSPIEDVELAKHLVRKGSFFEQDLDTLPNFTSEGYGSIRRVYVYGEEDQIFSRDFQLWQINNYKPDKVYCVPSADHKIQFSKVNELAQILQEVANSASDLLAVA

SEQ ID NO: 699 - DNA, 789 bp, synthetic construct
  misc_feature 1..789: note = Round 2 (Selectivity)
  source 1..789: mol_type = other DNA
atggttagtgcgcattttattctgattcacagtattggtcatggcgcctggctctggtataaactgatcccgttattacagtctgcaggtcataacgctacggcgattgatcttgtagctagcgggatcgaccctcgccaactggaacagattggcacatgggagcagtactcagaaccattgttcaccctgatcgaatcgctgccggaaggtgaaaaagtcattctggtaggagaatccggtggcggcatcaatattgcactggccgcggagaaatatccggagaaaattagcgccctcgtctttcacaacgcacttatgcccgatatcgatcacagtccagcgttcgtgtacaagaaatttactgaagttttcactgactggaaagattcgatcttcagcaattatacctacggtaacgacacggttaccgcggtggaattgggagatcgtactctggccgagaacatcttctccaattctccgattgaagatgtagaactggcgaaacatctggtccgcaaaggctccttctttgagcaagacttggataccctgccgaactttacgtcggaagggtatggttcaattcgtcgtgtgtatgtttacggcgaagaagaccagatctttagccgcgattttcagttatggcaaattaataattataagcctgataaagtgtactgtgtaccgagtgctgaccacaagattcagtttagcaaagtcaacgagctggcccagattctccaagaagttgcaaactctgcgagtgatcttcttgcagtggct

SEQ ID NO: 700 - protein, 263 aa, synthetic construct
  REGION 1..263: note = Round 2 (Selectivity)
MVSAHFILIHSIGHGAWLWYKLIPLLQSAGHNATAIDLVASGIDPRQLEQIGTWEQYSEPLFTLIESLPEGEKVILVGESGGGINIALAAEKYPEKISALVFHNALMPDIDHSPAFVYKKFTEVFTDWKDSIFSNYTYGNDTVTAVELGDRTLAENIFSNSPIEDVELAKHLVRKGSFFEQDLDTLPNFTSEGYGSIRRVYVYGEEDQIFSRDFQLWQINNYKPDKVYCVPSADHKIQFSKVNELAQILQEVANSASDLLAVA

SEQ ID NO: 701 - DNA, 789 bp, synthetic construct
  misc_feature 1..789: note = Round 2 (Selectivity)
  source 1..789: mol_type = other DNA
atggttagtgcgcattttattctgatccacagtatttgccatggcgcctggtgctggtataaactgatcccgttattacagtctgcaggtcataacgctacggcgattgatcttgtggctagcgggatcgaccctcgccaactggaacagattggcacatgggagcagtactcagaaccattgttcaccctgatcgaatcgattccggaaggtaagaaagtcattctggtaggagaatccggtggcggcatcaatattgcactggccgcggagaaatatccggagaaagtgagcgccctcgtctttcacaacgcacttatgcccgatatcgatcacagtccagcgttcgtgtataagaaatatagcgaagttttcactgactggaaagattcgatcttcagcaattatacctacggtaacgacacggttaccgcggtggaattgggagatcgtactctggccgagaacatcttctccaattctccgattgaagatgtagaactggcgaaacatctggtccgcaaaggctccttctttgagcaagacttggataccctgccgaactttacgtcggaagggtatggttcaattcgtcgtgtgtatgtttacggcgaagaagaccagatctttagccgcgattttcagttatggcaaattaataattataagcctgataaagtgtactgtgtcccgagtgctgaccacaagattcagatcagcaaagtcaacgagctggcccagattctccaagaagttgcaaactctgcgagtgatcttcttgcagtggct

SEQ ID NO: 702 - protein, 263 aa, synthetic construct
  REGION 1..263: note = Round 2 (Selectivity)
MVSAHFILIHSICHGAWCWYKLIPLLQSAGHNATAIDLVASGIDPRQLEQIGTWEQYSEPLFTLIESIPEGKKVILVGESGGGINIALAAEKYPEKVSALVFHNALMPDIDHSPAFVYKKYSEVFTDWKDSIFSNYTYGNDTVTAVELGDRTLAENIFSNSPIEDVELAKHLVRKGSFFEQDLDTLPNFTSEGYGSIRRVYVYGEEDQIFSRDFQLWQINNYKPDKVYCVPSADHKIQISKVNELAQILQEVANSASDLLAVA

SEQ ID NO: 703 - DNA, 789 bp, synthetic construct
  misc_feature 1..789: note = Round 2 (Selectivity)
  source 1..789: mol_type = other DNA
atggttagtgcgcattttattctgattcacagtattggtcatggcgcctggctctggtataaactgatcccgttattacagtctgcaggtcataacgctacggcgattgatctttgggctagcgggatcgaccctcgccaactggaacagattggcacatgggagcagtactcagaaccattgttcaccctgatcgaatcgctgccggaaggtgaaaaagtcattctggtaggagaatccggtggcggcatcaatattgcactggccgcggagaaatatccggagaaaattagcgccctcgtctttcacaacgcacttatgcccgatatcgatcacagtccagcgttcgtgtacaagaaatttagcgaagttttcactgactggaaagattcgatcttcagcaattatacctacggtaacgacacggttaccgcggtggaattgggagatcgtactctggccgagaacatcttctccaattctccgattgaagatgtagaactggcgaaacatctggtccgcaaaggctccttctttgagcaagacttggataccctgccgaactttacgtcggaagggtatggttcaattcgtcgtgtgtatgtttacggcgaagaagaccagatctttagccgcgattttcagttatggcaaattaataattataagcctgataaagtgtactgtgtaccgagtgctgaccacaagattcagattagcaaagtcaacgagctggcccagattctccaagaagttgcaaactctgcgagtgatcttcttgcagtggct

SEQ ID NO: 704 - protein, 263 aa, synthetic construct
  REGION 1..263: note = Round 2 (Selectivity)
MVSAHFILIHSIGHGAWLWYKLIPLLQSAGHNATAIDLWASGIDPRQLEQIGTWEQYSEPLFTLIESLPEGEKVILVGESGGGINIALAAEKYPEKISALVFHNALMPDIDHSPAFVYKKFSEVFTDWKDSIFSNYTYGNDTVTAVELGDRTLAENIFSNSPIEDVELAKHLVRKGSFFEQDLDTLPNFTSEGYGSIRRVYVYGEEDQIFSRDFQLWQINNYKPDKVYCVPSADHKIQISKVNELAQILQEVANSASDLLAVA

SEQ ID NO: 705 - DNA, 789 bp, synthetic construct
  misc_feature 1..789: note = Round 2 (Selectivity)
  source 1..789: mol_type = other DNA
atggttagtgcgcattttattctgatccacagtatttgccatggcgcctggatctggtataaactgatcccgttattacagtctgcaggtcataacgttacggcgattgatcttgtggctagcgggatcgaccctcgccaactggaacagattggcacatgggagcagtactcagaaccattgttcaccctgatcgaatcgattccggaaggtaagaaagtcattctggtaggagaatccggtggcggcatcaatattgcactggccgcggagaaatatccggagaaagtgagcgccctcgtctttcacaacgcacttatgcccgatatcgatcacagtccagcgttcgtgctgaagaaatggagcgaagttttcactgactggaaagattcgatcttcagcaattatacctacggtaacgacacggttaccgcggtggaattgggagatcgtactctggccgagaacatcttctccaattctccgattgaagatgtagaactggcgaaacatctggtccgcaaaggctccttctttgagcaagacttggataccctgccgaactttacgtcggaagggtatggttcaattcgtcgtgtgtatgtttacggcgaagaagaccagatctttagccgcgattttcagttatggcaaattaataattataagcctgataaagtgtactgtgtaccgagtgctgaccacaagattcagatcagcaaagtcaacgagctggcccagattctccaagaagttgcaaactctgcgagtgatcttcttgcagtggct

SEQ ID NO: 706 - protein, 263 aa, synthetic construct
  REGION 1..263: note = Round 2 (Selectivity)
MVSAHFILIHSICHGAWIWYKLIPLLQSAGHNVTAIDLVASGIDPRQLEQIGTWEQYSEPLFTLIESIPEGKKVILVGESGGGINIALAAEKYPEKVSALVFHNALMPDIDHSPAFVLKKWSEVFTDWKDSIFSNYTYGNDTVTAVELGDRTLAENIFSNSPIEDVELAKHLVRKGSFFEQDLDTLPNFTSEGYGSIRRVYVYGEEDQIFSRDFQLWQINNYKPDKVYCVPSADHKIQISKVNELAQILQEVANSASDLLAVA

SEQ ID NO: 707 - DNA, 789 bp, synthetic construct
  misc_feature 1..789: note = Round 2 (Selectivity)
  source 1..789: mol_type = other DNA
atggttagtgcgcattttattctgatccacagtatttgccatggcgcctggtgctggtataaactgatcccgttattacagtctgcaggtcataacgctacggcgattgatcttgtggctagcgggatcgaccctcgccaactggaacagattggcacatgggagcagtactcagaaccattgttcaccctgatcgaatcgattccggaaggtaagaaagtcattctggtaggagaatccggtggcggcatcaatattgcactggccgcggagaaatatccggagaaagtgagcgccctcgtctttcacaacgcacttatgcccgatatcgatcacagtccagcgttcgtgtataagaaatggagcgaagttttcactgactggaaagattcgatcttcagcaattatacctacggtaacgacacggttaccgcggtggaattgggagatcgtactctggccgagaacatcttctccaattctccgattgaagatgtagaactggcgaaacatctggtccgcaaaggctccttctttgagcaagacttggataccctgccgaactttacgtcggaagggtatggttcaattcgtcgtgtgtatgtttacggcgaagaagaccagatcatgagccgcgattttcagttatggcaaattaataattataagcctgataaagtgtactgtgtaccgagtgctgaccacaagattcagatcagcaaagtcaacgagctggcccagattctccaagaagttgcaaactctgcgagtgatcttcttgcagtggct

SEQ ID NO: 708 - protein, 263 aa, synthetic construct
  REGION 1..263: note = Round 2 (Selectivity)
MVSAHFILIHSICHGAWCWYKLIPLLQSAGHNATAIDLVASGIDPRQLEQIGTWEQYSEPLFTLIESIPEGKKVILVGESGGGINIALAAEKYPEKVSALVFHNALMPDIDHSPAFVYKKWSEVFTDWKDSIFSNYTYGNDTVTAVELGDRTLAENIFSNSPIEDVELAKHLVRKGSFFEQDLDTLPNFTSEGYGSIRRVYVYGEEDQIMSRDFQLWQINNYKPDKVYCVPSADHKIQISKVNELAQILQEVANSASDLLAVA

SEQ ID NO: 709 - DNA, 789 bp, synthetic construct
  misc_feature 1..789: note = Round 2 (Selectivity)
  source 1..789: mol_type = other DNA
atggttagtgcgcattttattctgatccacagtatttgccatggcgcctggtgctggtataaactgatcccgttattacagtctgcaggtcataacgttacggcgattgatcttgtggctagcgggatcgaccctcgccaactggaacagattggcacatgggagcagtactcagaaccattgttcaccctgatcgaatcgattccggaaggtaagaaagtcattctggtaggagaatccggtggcggcatcaatattgcactggccgcggagaaatatccggagaaagtgagcgccctcgtctttcacaacgcacttatgcccgatatcgatcacagtccagcgttcgtgctgaagaaatatagcgaagttttcactgactggaaagattcgatcttcagcaattatacctacggtaacgacacggttaccgcggtggaattgggagatcgtactctggccgagaacatcttctccaattctccgattgaagatgtagaactggcgaaacatctggtccgcaagggctccttctttgagcaagacttggataccctgccgaactttacgtcggaagggtatggttcaatccgtcgtgtgtatgtttacggcgaagaagaccagatctttagccgcgattttcagttatggcaaattaataattataagcctgataaagtgtactgtgtcccgagtgctgaccacaagattcagatcagcaaagtcaacgagctggcccagattctccaagaagttgcaaactctgcgagtgatcttcttgcagtggct

SEQ ID NO: 710 - protein, 263 aa, synthetic construct
  REGION 1..263: note = Round 2 (Selectivity)
MVSAHFILIHSICHGAWCWYKLIPLLQSAGHNVTAIDLVASGIDPRQLEQIGTWEQYSEPLFTLIESIPEGKKVILVGESGGGINIALAAEKYPEKVSALVFHNALMPDIDHSPAFVLKKYSEVFTDWKDSIFSNYTYGNDTVTAVELGDRTLAENIFSNSPIEDVELAKHLVRKGSFFEQDLDTLPNFTSEGYGSIRRVYVYGEEDQIFSRDFQLWQINNYKPDKVYCVPSADHKIQISKVNELAQILQEVANSASDLLAVA

SEQ ID NO: 711 - DNA, 789 bp, synthetic construct
  misc_feature 1..789: note = Round 2 (Selectivity)
  source 1..789: mol_type = other DNA
atggttagtgcgcattttattctgatccacagtatttgccatggcgcctggtgctggtataaactgatcccgctattacagtctgcaggtcataacgctacggcgattgatcttgtggctagcgggatcgaccctcgccaactggaacagattggcacatgggagcagtactcagaaccattgttcaccctgatcgaatcgattccggaaggtaagaaagtcattctggtaggagaatccggtggcggcatcaatattgcactggccgcggagaaatatccggagaaagtgagcgccctcgtctttcacaacgcacttatgcccgatatcgatcacagtccagcgttcgtgtataagaaatatagcgaagttttcactgactggaaagattcgatcttcagcaattatacctacggtaacgacacggttaccgcggtggaattgggagatcgtactctggccgagaacatcttctccaattctccgattgaagatgtagaactggcgaaacatctggtccgcaaaggctccttctttgagcaagacttggataccctgccgaactttacgtcggaagggtatggttcaattcgtcgtgtgtatgtttacggcgaagaagaccagatctttagccgcgattttcagttatggcaaattaataattataagcctgataaagtgtactgtatcccgagtgctgaccacaagattcagatcagcaaagtcaacgagctggcccagattctccaagaagttgcaaactctgcgagtgatcttcttgcagtggct

SEQ ID NO: 712 - protein, 263 aa, synthetic construct
  REGION 1..263: note = Round 2 (Selectivity)
MVSAHFILIHSICHGAWCWYKLIPLLQSAGHNATAIDLVASGIDPRQLEQIGTWEQYSEPLFTLIESIPEGKKVILVGESGGGINIALAAEKYPEKVSALVFHNALMPDIDHSPAFVYKKYSEVFTDWKDSIFSNYTYGNDTVTAVELGDRTLAENIFSNSPIEDVELAKHLVRKGSFFEQDLDTLPNFTSEGYGSIRRVYVYGEEDQIFSRDFQLWQINNYKPDKVYCIPSADHKIQISKVNELAQILQEVANSASDLLAVA

SEQ ID NO: 713 - DNA, 789 bp, synthetic construct
  misc_feature 1..789: note = Round 2 (Selectivity)
  source 1..789: mol_type = other DNA
atggttagtgcgcattttattctgatccacagtatttgccatggcgcctggtgctggtataaactgatcccgttattacagtctgcaggtcataacgctacggcgattgatctttgggctagcgggatcgaccctcgccaactggaacagattggcacatgggagcagtactcagaaccattgttcaccctgatcgaatcgattccggaaggtaagaaagtcattctggtaggagaatccggtggcggcatcaatattgcactggccgcggagaaatatccggagaaagtgagcgccctcgtctttcacaacgcacttatgcccgatatcgatcacagtccagcgttcgtgctgaagaaatggagcgaagttttcactgactggaaagattcgatcttcagcaattatacctacggtaacgacacggttaccgcggtggaattgggagatcgtactctggccgagaacatcttctccaattctccgattgaagatgtagaactggcgaaacatctggtccgcaaaggctccttctttgagcaagacttggataccctgccgaactttacgtcggaagggtatggttcaattcgtcgtgtgtatgtttacggcgaagaagaccagatctttagccgcgattttcagttatggcaaattaataattataagcctgataaagtgtactgtgtaccgagtgctgaccacaagattcagatcagcaaagtcaacgagctggcccagattctccaagaagttgcaaactctgcgagtgatcttcttgcagtggct

SEQ ID NO: 714 - protein, 263 aa, synthetic construct
  REGION 1..263: note = Round 2 (Selectivity)
MVSAHFILIHSICHGAWCWYKLIPLLQSAGHNATAIDLWASGIDPRQLEQIGTWEQYSEPLFTLIESIPEGKKVILVGESGGGINIALAAEKYPEKVSALVFHNALMPDIDHSPAFVLKKWSEVFTDWKDSIFSNYTYGNDTVTAVELGDRTLAENIFSNSPIEDVELAKHLVRKGSFFEQDLDTLPNFTSEGYGSIRRVYVYGEEDQIFSRDFQLWQINNYKPDKVYCVPSADHKIQISKVNELAQILQEVANSASDLLAVA

SEQ ID NO: 715 - DNA, 789 bp, synthetic construct
  misc_feature 1..789: note = Round 2 (Selectivity)
  source 1..789: mol_type = other DNA
atggttagtgcgcattttattctgatccacagtatttgccatggcgcctggctgtggtataaactgatcccgttattacagtctgcaggtcataacgctacggcgattgatctttgggctagcgggatcgaccctcgccaactggaacagattggcacatgggagcagtactcagaaccattgttcaccctgatcgaatcgattccggaaggtaagaaagtcattctggtaggagaatccggtggcggcatcaatattgcactggccgcggagaaatatccggagaaagtgagcgccctcgtctttcacaacgcacttatgcccgatatcgatcacagtccagcgttcgtgtataagaaatggagcgaagttttcactgactggaaagattcgatcttcagcaattatacctacggtaacgacacggttaccgcggtggaattgggagatcgtactctggccgagaacatcttctccaattctccgattgaagatgtagaactggcgaaacatctggtccgcaaaggctccttctttgagcaagacttggataccctgccgaactttacgtcggaagggtatggttcaattcgtcgtgtgtatgtttacggcgaagaagaccagatcatgagccgcgattttcagttatggcaaattaataattataagcctgataaagtgtactgtatcccgagtgctgaccacaagattcagatcagcaaagtcaacgagctggcccagattctccaagaagttgcaaactctgcgagtgatcttcttgcagtggct

SEQ ID NO: 716 - protein, 263 aa, synthetic construct
  REGION 1..263: note = Round 2 (Selectivity)
MVSAHFILIHSICHGAWLWYKLIPLLQSAGHNATAIDLWASGIDPRQLEQIGTWEQYSEPLFTLIESIPEGKKVILVGESGGGINIALAAEKYPEKVSALVFHNALMPDIDHSPAFVYKKWSEVFTDWKDSIFSNYTYGNDTVTAVELGDRTLAENIFSNSPIEDVELAKHLVRKGSFFEQDLDTLPNFTSEGYGSIRRVYVYGEEDQIMSRDFQLWQINNYKPDKVYCIPSADHKIQISKVNELAQILQEVANSASDLLAVA

SEQ ID NO: 717 - DNA, 789 bp, synthetic construct
  misc_feature 1..789: note = Round 2 (Selectivity)
  source 1..789: mol_type = other DNA
atggttagtgcgcattttattctgatccacagtattggtcatggcgcctggctctggtataaactgatcccgttattacagtctgcaggtcataacgctacggcgattgatctttgggctagcgggatcgaccctcgccaactggaacagattggcacatgggagcagtactcagaaccattgttcaccctgatcgaatcgattccggaaggtaagaaagtcattctggtaggagaatccggtggcggcatcaatattgcactggccgcggagaaatatccggagaaaattagcgccctcgtctttcacaacgcacttatgcccgatatcgatcacagtccagcgttcgtgtacaagaaatttagtgaagttttcactgactggaaagattcgatcttcagcaattatacctacggtaacgacacggttaccgcggtggaattgggagatcgtactctggccgagaacatcttctccaattctccgattgaagatgtagaactggcgaaacatctggtccgcaaaggctccttctttgagcaagacttggataccctgccgaactttacgtcggaagggtatggttcaattcgtcgtgtgtatgtttacggcgaagaagaccagatctttagccgcgattttcagttatggcaaattaataattataagcctgataaagtgtactgtgtaccgagtgctgaccacaagattcagtttagcaaagtcaacgagctggcccagattctccaagaagttgcaaactctgcgagtgatcttcttgcagtggct

SEQ ID NO: 718 - protein, 263 aa, synthetic construct
  REGION 1..263: note = Round 2 (Selectivity)
MVSAHFILIHSIGHGAWLWYKLIPLLQSAGHNATAIDLWASGIDPRQLEQIGTWEQYSEPLFTLIESIPEGKKVILVGESGGGINIALAAEKYPEKISALVFHNALMPDIDHSPAFVYKKFSEVFTDWKDSIFSNYTYGNDTVTAVELGDRTLAENIFSNSPIEDVELAKHLVRKGSFFEQDLDTLPNFTSEGYGSIRRVYVYGEEDQIFSRDFQLWQINNYKPDKVYCVPSADHKIQFSKVNELAQILQEVANSASDLLAVA

SEQ ID NO: 719 - DNA, 789 bp, synthetic construct
  misc_feature 1..789: note = Round 2 (Selectivity)
  source 1..789: mol_type = other DNA
atggttagtgcgcattttattctgatccacagtatttgccatggcgcctggtgctggtataaactgatcccgttattacagtctgcaggtcataacgttacggcgattgatcttgtggctagcgggatcgaccctcgccaactggaacagattggcacatgggagcagtactcagaaccattgttcaccctgatcgaatcgattccggaaggtaagaaagtcattctggtaggagaatccggtggcggcatcaatattgcactggccgcggagaaatatccggagaaagtgagcgccctcgtctttcacaacgcacttatgcccgatatcgatcacagtccagcgttcgtgtataagaaatatagcgaagttttcactgactggaaagattcgatcttcagcaattatacctacggtaacgacacggttaccgcggtggaattgggagatcgtactctggccgagaacatcttctccaattctccgattgaagatgtagaactggcgaaacatctggtccgcaaaggctccttctttgagcaagacttggataccctgccgaactttacgtcggaagggtatggttcaattcgtcgtgtgtatgtttacggcgaagaagaccagatctttagccgcgattttcagttatggcaaattaataattataagcctgataaagtgtactgtgtaccgagtgctgaccacaagattcagatcagcaaagtcaacgagctggcccagattctccaagaagttgcaaactctgcgagtgatcttcttgcagtggct

SEQ ID NO: 720 - protein, 263 aa, synthetic construct
  REGION 1..263: note = Round 2 (Selectivity)
MVSAHFILIHSICHGAWCWYKLIPLLQSAGHNVTAIDLVASGIDPRQLEQIGTWEQYSEPLFTLIESIPEGKKVILVGESGGGINIALAAEKYPEKVSALVFHNALMPDIDHSPAFVYKKYSEVFTDWKDSIFSNYTYGNDTVTAVELGDRTLAENIFSNSPIEDVELAKHLVRKGSFFEQDLDTLPNFTSEGYGSIRRVYVYGEEDQIFSRDFQLWQINNYKPDKVYCVPSADHKIQISKVNELAQILQEVANSASDLLAVA

SEQ ID NO: 721 - DNA, 789 bp, synthetic construct
  misc_feature 1..789: note = Round 2 (Selectivity)
  source 1..789: mol_type = other DNA
atggttagtgcgcattttattctgatccacagtatttgccatggcgcctggtgctggtataaactgatcccgttattacagtctgcaggtcataacgctacggcgattgatcttgtggctagcgggatcgaccctcgccaactggaacagattggcacatgggagcagtactcagaaccattgttcaccctgatcgaatcgattccggaaggtaagaaagtcattctggtaggagaatccggtggcggcatcaatattgcactggccgcggagaaatatccggagaaagtgagcgccctcgtctttcacaacgcacttatgcccgatatcgatcacagtccagcgttcgtgctgaagaaatatagcgaagttttcactgactggaaagattcgatcttcagcaattatacctacggtaacgacacggttaccgcggtggaattgggagatcgtactctggccgagaacatcttctccaattctccgattgaagatgtagaactggcgaaacatctggtccgcaaaggctccttctttgagcaagacttggataccctgccgaactttacgtcggaagggtatggttcaattcgtcgtgtgtatgtttacggcgaagaagaccagatctttagccgcgattttcagttatggcaaattaataattataagcctgataaagtgtactgtgtaccgagtgctgaccacaagattcagatcagcaaagtcaacgagctggcccagattctccaagaagttgcaaactctgcgagtgatcttcttgcagtggct

SEQ ID NO: 722 - protein, 263 aa, synthetic construct
  REGION 1..263: note = Round 2 (Selectivity)
MVSAHFILIHSICHGAWCWYKLIPLLQSAGHNATAIDLVASGIDPRQLEQIGTWEQYSEPLFTLIESIPEGKKVILVGESGGGINIALAAEKYPEKVSALVFHNALMPDIDHSPAFVLKKYSEVFTDWKDSIFSNYTYGNDTVTAVELGDRTLAENIFSNSPIEDVELAKHLVRKGSFFEQDLDTLPNFTSEGYGSIRRVYVYGEEDQIFSRDFQLWQINNYKPDKVYCVPSADHKIQISKVNELAQILQEVANSASDLLAVA

SEQ ID NO: 723 - DNA, 789 bp, synthetic construct
  misc_feature 1..789: note = Round 2 (Selectivity)
  source 1..789: mol_type = other DNA
atggttagtgcgcattttattctgatccacagtatttgccatggcgcctggatctggtataaactgatcccgttattacagtctgcaggtcataacgctacggcgattgatcttgtggctagcgggatcgaccctcgccaactggaacagattggcacatgggagcagtactcagaaccattgttcaccctgatcgaatcgattccggaaggtaagaaagtcattctggtaggagaatccggtggcggcatcaatattgcactggccgcggagaaatatccggagaaagtgagcgccctcgtctttcacaacgcacttatgcccgatatcgatcacagtccagcgttcgtgctgaagaaatggagcgaagttttcactgactggaaagattcgatcttcagcaattatacctacggtaacgacacggttaccgcggtggaattgggagatcgtactctggccgagaacatcttctccaattctccgattgaagatgtagaactggcgaaacatctggtccgccctggctccttctttgagcaagacttggataccctgccgaactttacgtcggaagggtatggttcaatccgtcgtgtgtatgtttacggcgaagaagaccagatctttagccgcgattttcagttatggcaaattaataattataagcctgataaagtgtactgtgtaccgagtgctgaccacaagattcagatcagcaaagtcaacgagctggcccagattctccaagaagttgcaaactctgcgagtgatcttcttgcagtggct

SEQ ID NO: 724 - protein, 263 aa, synthetic construct
  REGION 1..263: note = Round 2 (Selectivity)
MVSAHFILIHSICHGAWIWYKLIPLLQSAGHNATAIDLVASGIDPRQLEQIGTWEQYSEPLFTLIESIPEGKKVILVGESGGGINIALAAEKYPEKVSALVFHNALMPDIDHSPAFVLKKWSEVFTDWKDSIFSNYTYGNDTVTAVELGDRTLAENIFSNSPIEDVELAKHLVRPGSFFEQDLDTLPNFTSEGYGSIRRVYVYGEEDQIFSRDFQLWQINNYKPDKVYCVPSADHKIQISKVNELAQILQEVANSASDLLAVA

SEQ ID NO: 725 - DNA, 789 bp, synthetic construct
  misc_feature 1..789: note = Round 2 (Selectivity)
  source 1..789: mol_type = other DNA
atggttagtgcgcattttattctgatccacagtatttgccatggcgcctggatctggtataaactgatcccgttattacagtctgcaggtcataacgctacggcgattgatcttgtggctagcgggatcgaccctcgccaactggaacagattggcacatgggagcagtactcagaaccattgttcaccctgatcgaatcgattccggaaggtaagaaagtcattctggtaggagaatccggtggcggcatcaatattgcactggccgcggagaaatatccggagaaagtgagcgccctcgtctttcacaacgcacttatgcccgatatcgatcacagtccagcgttcgtgtataagaaatggagcgaagttttcactgactggaaagattcgatcttcagcaattatacctacggtaacgacacggttaccgcggtggaattgggagatcgtactctggccgagaacatcttctccaattctccgattgaagatgtagaactggcgaaacatctggtccgcaaaggctccttctttgagcaagacttggataccctgccgaactttacgtcggaagggtatggttcaattcgtcgtgtgtatgtttacggcgaagaagaccagatctttagccgcgattttcagttatggcaaattaataattataagcctgataaagtgtactgtgtcccgagtgctgaccacaagattcagatcagcaaagtcaacgagctggcccagattctccaagaagttgcaaactctgcgagtgatcttcttgcagtggct

SEQ ID NO: 726 - protein, 263 aa, synthetic construct
  REGION 1..263: note = Round 2 (Selectivity)
MVSAHFILIHSICHGAWIWYKLIPLLQSAGHNATAIDLVASGIDPRQLEQIGTWEQYSEPLFTLIESIPEGKKVILVGESGGGINIALAAEKYPEKVSALVFHNALMPDIDHSPAFVYKKWSEVFTDWKDSIFSNYTYGNDTVTAVELGDRTLAENIFSNSPIEDVELAKHLVRKGSFFEQDLDTLPNFTSEGYGSIRRVYVYGEEDQIFSRDFQLWQINNYKPDKVYCVPSADHKIQISKVNELAQILQEVANSASDLLAVA

SEQ ID NO: 727 - DNA, 789 bp, synthetic construct
  misc_feature 1..789: note = Round 2 (Selectivity)
  source 1..789: mol_type = other DNA
atggttagtgcgcattttattctgatccacagtatttgccatggcgcctggtgctggtataaactgatcccgttattacagtctgcaggtcataacgttacggcgattgatcttgtggctagcgggatcgaccctcgccaactggaacagattggcacatgggagcagtactcagaaccattgttcaccctgatcgaatcgattccggaaggtaagaaagtcattctggtaggagaatccggtggcggcatcaatattgcactggccgcggagaaatatccggagaaagtgagcgccctcgtctttcacaacgcacttatgcccgatatcgatcacagtccagcgttcgtgtataagaaatatagcgaagttttcactgactggaaagattcgatcttcagcaattatacctacggtaacgacacggttaccgcggtggaattgggagatcgtactctggccgagaacatcttctccaattctccgattgaagatgtagaactggcgaaacatctggtccgcaagggctccttctttgagcaagacttggataccctgccgaactttacgtcggaagggtatggttcagtccgtcgtgtgtatgtttacggcgaagaagaccagatctttagccgcgattttcagttatggcaaattaataattataagcctgataaagtgtactgtgtcccgagtgctgaccacaagattcagatcagcaaagtcaacgagctggcccagattctccaagaagttgcaaactctgcgagtgatcttcttgcagtggct

SEQ ID NO: 728 - protein, 263 aa, synthetic construct
  REGION 1..263: note = Round 2 (Selectivity)
MVSAHFILIHSICHGAWCWYKLIPLLQSAGHNVTAIDLVASGIDPRQLEQIGTWEQYSEPLFTLIESIPEGKKVILVGESGGGINIALAAEKYPEKVSALVFHNALMPDIDHSPAFVYKKYSEVFTDWKDSIFSNYTYGNDTVTAVELGDRTLAENIFSNSPIEDVELAKHLVRKGSFFEQDLDTLPNFTSEGYGSVRRVYVYGEEDQIFSRDFQLWQINNYKPDKVYCVPSADHKIQISKVNELAQILQEVANSASDLLAVA

SEQ ID NO: 729 - DNA, 789 bp, synthetic construct
  misc_feature 1..789: note = Round 2 (Selectivity)
  source 1..789: mol_type = other DNA
atggttagtgcgcattttattctgatccacagtatttgccatggcgcctggtgctggtataaactgatcccgttattacagtctgcaggtcataacgctacggcgattgatcttgtggctagcgggatcgaccctcgccaactggaacagattggcacatgggagcagtactcagaaccattgttcaccctgatcgaatcgattccggaaggtaagaaagtcattctggtaggagaatccggtggcggcatcaatattgcactggccgcggagaaatatccggagaaagtgagcgccctcgtctttcacaacgcacttatgcccgatatcgatcacagtccagcgttcgtgtataagaaatggagcgaagttttcactgactggaaagattcgatcttcagcaattatacctacggtaacgacacggttaccgcggtggaattgggagatcgtactctggccgagaacatcttctccaattctccgattgaagatgtagaactggcgaaacatctggtccgccctggctccttctttgagcaagacttggataccctgccgaactttacgtcggaagggtatggttcaatccgtcgtgtgtatgtttacggcgaagaagaccagatctttagccgcgattttcagttatggcaaattaataattataagcctgataaagtgtactgtgtaccgagtgctgaccacaagattcagatcagcaaagtcaacgagctggcccagattctccaagaagttgcaaactctgcgagtgatcttcttgcagtggct

SEQ ID NO: 730 - protein, 263 aa, synthetic construct
  REGION 1..263: note = Round 2 (Selectivity)
MVSAHFILIHSICHGAWCWYKLIPLLQSAGHNATAIDLVASGIDPRQLEQIGTWEQYSEPLFTLIESIPEGKKVILVGESGGGINIALAAEKYPEKVSALVFHNALMPDIDHSPAFVYKKWSEVFTDWKDSIFSNYTYGNDTVTAVELGDRTLAENIFSNSPIEDVELAKHLVRPGSFFEQDLDTLPNFTSEGYGSIRRVYVYGEEDQIFSRDFQLWQINNYKPDKVYCVPSADHKIQISKVNELAQILQEVANSASDLLAVA

SEQ ID NO: 731 - DNA, 789 bp, synthetic construct
  misc_feature 1..789: note = Round 2 (Selectivity)
  source 1..789: mol_type = other DNA
atggttagtgcgcattttattctgatccacagtatttgccatggcgcctggatctggtataaactgatcccgttattacagtctgcaggtcataacgctacggcgattgatctttgggctagcgggatcgaccctcgccaactggaacagattggcacatgggagcagtactcagaaccattgttcaccctgatcgaatcgattccggaaggtaagaaagtcattctggtaggagaatccggtggcggcatcaatattgcactggccgcggagaaatatccggagaaagtgagcgccctcgtctttcacaacgcacttatgcccgatatcgatcacagtccagcgttcgtgtataagaaagttagcgaagttttcactgactggaaagattcgatcttcagcaattatacctacggtaacgacacggttaccgcggtggaattgggagatcgtactctggccgagaacatcttctccaattctccgattgaagatgtagaactggcgaaacatctggtccgccctggctccttctttgagcaagacttggataccctgccgaactttacgtcggaagggtatggttcaatccgtcgtgtgtatgtttacggcgaagaagaccagatctttagccgcgattttcagttatggcaaattaataattataagcctgataaagtgtactgtgtaccgagtgctgaccacaagattcagatcagcaaagtcaacgagctggcccagattctccaagaagttgcaaactctgcgagtgatcttcttgcagtggct

SEQ ID NO: 732 - protein, 263 aa, synthetic construct
  REGION 1..263: note = Round 2 (Selectivity)
MVSAHFILIHSICHGAWIWYKLIPLLQSAGHNATAIDLWASGIDPRQLEQIGTWEQYSEPLFTLIESIPEGKKVILVGESGGGINIALAAEKYPEKVSALVFHNALMPDIDHSPAFVYKKVSEVFTDWKDSIFSNYTYGNDTVTAVELGDRTLAENIFSNSPIEDVELAKHLVRPGSFFEQDLDTLPNFTSEGYGSIRRVYVYGEEDQIFSRDFQLWQINNYKPDKVYCVPSADHKIQISKVNELAQILQEVANSASDLLAVA

SEQ ID NO: 733 - DNA, 789 bp, synthetic construct
  misc_feature 1..789: note = Round 2 (Selectivity)
  source 1..789: mol_type = other DNA
atggttagtgcgcattttattctgatccacagtatttgccatggcgcctggctgtggtataaactgatcccgttattacagtctgcaggtcataacgttacggcgattgatctttgggctagcgggatcgaccctcgccaactggaacagattggcacatgggagcagtactcagaaccattgttcaccctgatcgaatcgattccggaaggtaagaaagtcattctggtaggagaatccggtggcggcatcaatattgcactggccgcggagaaatatccggagaaagtgagcgccctcgtctttcacaacgcacttatgcccgatatcgatcacagtccagcgttcgtgtataagaaagttagcgaagttttcactgactggaaagattcgatcttcagcaattatacctacggtaacgacacggttaccgcggtggaattgggagatcgtactctggccgagaacatcttctccaattctccgattgaagatgtagaactggcgaaacatctggtccgcaagggctccttctttgagcaagacttggataccctgccgaactttacgtcggaagggtatggttcaatccgtcgtgtgtatgtttacggcgaagaagaccagatctttagccgcgattttcagttatggcaaattaataattataagcctgataaagtgtactgtgtaccgagtgctgaccacaagattcagatcagcaaagtcaacgagctggcccagattctccaagaagttgcaaactctgcgagtgatcttcttgcagtggct

SEQ ID NO: 734 - protein, 263 aa, synthetic construct
  REGION 1..263: note = Round 2 (Selectivity)
MVSAHFILIHSICHGAWLWYKLIPLLQSAGHNVTAIDLWASGIDPRQLEQIGTWEQYSEPLFTLIESIPEGKKVILVGESGGGINIALAAEKYPEKVSALVFHNALMPDIDHSPAFVYKKVSEVFTDWKDSIFSNYTYGNDTVTAVELGDRTLAENIFSNSPIEDVELAKHLVRKGSFFEQDLDTLPNFTSEGYGSIRRVYVYGEEDQIFSRDFQLWQINNYKPDKVYCVPSADHKIQISKVNELAQILQEVANSASDLLAVA

SEQ ID NO: 735 - DNA, 789 bp, synthetic construct
  misc_feature 1..789: note = Round 2 (Selectivity)
  source 1..789: mol_type = other DNA
atggttagtgcgcattttattctgatccacagtatttgccatggcgcctggatctggtataaactgatcccgttattacagtctgcaggtcataacgttacggcgattgatctttgggctagcgggatcgaccctcgccaactggaacagattggcacatgggagcagtactcagaaccattgttcaccctgatcgaatcgattccggaaggtaagaaagtcattctggtaggagaatccggtggcggcatcaatattgcactggccgcggagaaatatccggagaaagtgagcgccctcgtctttcacaacgcacttatgcccgatatcgatcacagtccagcgttcgtgtataagaaatggagcgaagttttcactgactggaaagattcgatcttcagcaattatacctacggtaacgacacggttaccgcggtggaattgggagatcgtactctggccgagaacatcttctccaattctccgattgaagatgtagaactggcgaaacatctggtccgcaaaggctccttctttgagcaagacttggataccctgccgaactttacgtcggaagggtatggttcaattcgtcgtgtgtatgtttacggcgaagaagaccagatctttagccgcgattttcagttatggcaaattaataattataagcctgataaagtgtactgtgtaccgagtgctgaccacaagattcagatcagcaaagtcaacgagctggcccagattctccaagaagttgcaaactctgcgagtgatcttcttgcagtggct

SEQ ID NO: 736 - protein, 263 aa, synthetic construct
  REGION 1..263: note = Round 2 (Selectivity)
MVSAHFILIHSICHGAWIWYKLIPLLQSAGHNVTAIDLWASGIDPRQLEQIGTWEQYSEPLFTLIESIPEGKKVILVGESGGGINIALAAEKYPEKVSALVFHNALMPDIDHSPAFVYKKWSEVFTDWKDSIFSNYTYGNDTVTAVELGDRTLAENIFSNSPIEDVELAKHLVRKGSFFEQDLDTLPNFTSEGYGSIRRVYVYGEEDQIFSRDFQLWQINNYKPDKVYCVPSADHKIQISKVNELAQILQEVANSASDLLAVA

SEQ ID NO: 737 - DNA, 789 bp, synthetic construct
  misc_feature 1..789: note = Round 2 (Selectivity)
  source 1..789: mol_type = other DNA
atggttagtgcgcattttattctgatccacagtatttgccatggcgcctggatctggtataaactgatcccgttattacagtctgcaggtcataacgttacggcgattgatctttgggctagcgggatcgaccctcgccaactggaacagattggcacatgggagcagtactcagaaccattgttcaccctgatcgaatcgattccggaaggtaagaaagtcattctggtaggagaatccggtggcggcatcaatattgcactggccgcggagaaatatccggagaaagtgagcgccctcgtctttcacaacgcacttatgcccgatatcgatcacagtccagcgttcgtgtataagaaagttagcgaagttttcactgactggaaagattcgatcttcagcaattatacctacggtaacgacacggttaccgcggtggaattgggagatcgtactctggccgagaacatcttctccaattctccgattgaagatgtagaactggcgaaacatctggtccgccctggctccttctttgagcaagacttggataccctgccgaactttacgtcggaagggtatggttcagtccgtcgtgtgtatgtttacggcgaagaagaccagatctttagccgcgattttcagttatggcaaattaataattataagcctgataaagtgtactgtgtaccgagtgctgaccacaagattcagatcagcaaagtcaacgagctggcccagattctccaagaagttgcaaactctgcgagtgatcttcttgcagtggct

SEQ ID NO: 738 - protein, 263 aa, synthetic construct
  REGION 1..263: note = Round 2 (Selectivity)
MVSAHFILIHSICHGAWIWYKLIPLLQSAGHNVTAIDLWASGIDPRQLEQIGTWEQYSEPLFTLIESIPEGKKVILVGESGGGINIALAAEKYPEKVSALVFHNALMPDIDHSPAFVYKKVSEVFTDWKDSIFSNYTYGNDTVTAVELGDRTLAENIFSNSPIEDVELAKHLVRPGSFFEQDLDTLPNFTSEGYGSVRRVYVYGEEDQIFSRDFQLWQINNYKPDKVYCVPSADHKIQISKVNELAQILQEVANSASDLLAVA

SEQ ID NO: 739 - DNA, 789 bp, synthetic construct
  misc_feature 1..789: note = Round 2 (Selectivity)
  source 1..789: mol_type = other DNA
atggttagtgcgcattttattctgatccacagtatttgccatggcgcctggtgctggtataaactgatcccgttattacagtctgcaggtcataacgttacggcgattgatctttgggctagcgggatcgaccctcgccaactggaacagattggcacatgggagcagtactcagaaccattgttcaccctgatcgaatcgattccggaaggtaagaaagtcattctggtaggagaatccggtggcggcatcaatattgcactggccgcggagaaatatccggagaaagtgagcgccctcgtctttcacaacgcacttatgcccgatatcgatcacagtccagcgttcgtgtataagaaatggagcgaagttttcactgactggaaagattcgatcttcagcaattatacctacggtaacgacacggttaccgcggtggaattgggagatcgtactctggccgagaacatcttctccaattctccgattgaagatgtagaactggcgaaacatctggtccgcaagggctccttctttgagcaagacttggataccctgccgaactttacgtcggaagggtatggttcaatccgtcgtgtgtatgtttacggcgaagaagaccagatcatgagccgcgattttcagttatggcaaattaataattataagcctgataaagtgtactgtgtaccgagtgctgaccacaagattcagatcagcaaagtcaacgagctggcccagattctccaagaagttgcaaactctgcgagtgatcttcttgcagtggct

SEQ ID NO: 740 - protein, 263 aa, synthetic construct
  REGION 1..263: note = Round 2 (Selectivity)
MVSAHFILIHSICHGAWCWYKLIPLLQSAGHNVTAIDLWASGIDPRQLEQIGTWEQYSEPLFTLIESIPEGKKVILVGESGGGINIALAAEKYPEKVSALVFHNALMPDIDHSPAFVYKKWSEVFTDWKDSIFSNYTYGNDTVTAVELGDRTLAENIFSNSPIEDVELAKHLVRKGSFFEQDLDTLPNFTSEGYGSIRRVYVYGEEDQIMSRDFQLWQINNYKPDKVYCVPSADHKIQISKVNELAQILQEVANSASDLLAVA

SEQ ID NO: 741 - DNA, 789 bp, synthetic construct
  misc_feature 1..789: note = Round 2 (Selectivity)
  source 1..789: mol_type = other DNA
atggttagtgcgcattttattctgatccacagtatttgccatggcgcctggctctggactaaactgatcccgttattacagtctgcaggtcataacgctacggcgattgatcttgtggctagcgggatcgaccctcgccaactggaacagattggcacatgggagcagtactcagaaccattgttcaccctgatcgaatcgattccggaaggtaagaaagtcattctggtaggagaatccggtggcggcatcaatattgcactggccgcggagaaatatccggagaaagtgagcgccctcgtctttcacaacgcacttatgcccgatatcgatcacagtccagcgttcgtgtacaagaaatttagcgaagttttcactgactggaaagattcgatcttcagcaattatacctacggtaacgacacggttaccgcggtggaattgggagatcgtactctggccgagaacatcttctccaattctccgattgaagatgtagaactggcgaaacatctggtccgcaaaggctccttctttgagcaagacttggataccctgccgaactttacgtcggaagggtatggttcaattcgtcgtgtgtatgtttacggcgaagaagaccagatctttagccgcgattttcagttatggcaaattaataattataagcctgataaagtgtactgtgtaccgagtgctgaccacaagattcagatcagcaaagtcaacgagctggcccagattctccaagaagttgcaaactctgcgagtgatcttcttgcagtggct

SEQ ID NO: 742 - protein, 263 aa, synthetic construct
  REGION 1..263: note = Round 2 (Selectivity)
MVSAHFILIHSICHGAWLWTKLIPLLQSAGHNATAIDLVASGIDPRQLEQIGTWEQYSEPLFTLIESIPEGKKVILVGESGGGINIALAAEKYPEKVSALVFHNALMPDIDHSPAFVYKKFSEVFTDWKDSIFSNYTYGNDTVTAVELGDRTLAENIFSNSPIEDVELAKHLVRKGSFFEQDLDTLPNFTSEGYGSIRRVYVYGEEDQIFSRDFQLWQINNYKPDKVYCVPSADHKIQISKVNELAQILQEVANSASDLLAVA

SEQ ID NO: 743 - DNA, 789 bp, synthetic construct
  misc_feature 1..789: note = Round 2 (Selectivity)
  source 1..789: mol_type = other DNA
atggttagtgcgcattttattctgatccacagtatttgccatggcgcctggatctggtataaactgatcccgttattacagtctgcaggtcataacgttacggcgattgatctttgggctagcgggatcaaccctcgccaactggaacagattggcacatgggagcagtactcagaaccattgttcaccctgatcgaatcgattccggaaggtaagaaagtcattctggtaggagaatccggtggcggcatcaatattgcactggccgcggagaaatatccggagaaagtgagcgccctcgtctttcacaacgcacttatgcccgatatcgatcacagtccagcgttcgtgctgaagaaatggagcgaagttttcactgactggaaagattcgatcttcagcaattatacctacggtaacgacacggttaccgcggtggaattgggagatcgtactctggccgagaacatcttctccaattctccgattgaagatgtagaactggcgaaacatctggtccgccctggctccttctttgagcaagacttggataccctgccgaactttacgtcggaagggtatggttcagtccgtcgtgtgtatgtttacggcgaagaagaccagatcatgagccgcgattttcagttatggcaaattaataattataagcctgataaagtgtactgtgtaccgagtgctgaccacaagattcagatcagcaaagtcaacgagctggcccagattctccaagaagttgcaaactctgcgagtgatcttcttgcagtggct

SEQ ID NO: 744 - protein, 263 aa, synthetic construct
  REGION 1..263: note = Round 2 (Selectivity)
MVSAHFILIHSICHGAWIWYKLIPLLQSAGHNVTAIDLWASGINPRQLEQIGTWEQYSEPLFTLIESIPEGKKVILVGESGGGINIALAAEKYPEKVSALVFHNALMPDIDHSPAFVLKKWSEVFTDWKDSIFSNYTYGNDTVTAVELGDRTLAENIFSNSPIEDVELAKHLVRPGSFFEQDLDTLPNFTSEGYGSVRRVYVYGEEDQIMSRDFQLWQINNYKPDKVYCVPSADHKIQISKVNELAQILQEVANSASDLLAVA

SEQ ID NO: 745 - DNA, 789 bp, synthetic construct
  misc_feature 1..789: note = Round 2 (Selectivity)
  source 1..789: mol_type = other DNA
atggttagtgcgcattttattctggttcacagtattggtcatggcgcctggctctggtataaactgatcccgttattacagtctgcaggtcataacgctacggcgattgatctttgggctagcgggatcgaccctcgccaactggaacagattggcacatgggagcagtactcagaaccattgttcaccctgatcgaatcgctgccggaaggtgaaaaagtcattctggtaggagaatccggtggcggcatcaatattgcactggccgcggagaaatatccggagaaagtgagcgccctcgtctttcacaacgcacttatgcccgatatcgatcacagtccagcgttcgtgtacaagaaatttagtgaagttttcactgactggaaagattcgatcttcagcaattatacctacggtaacgacacggttaccgcggtggaattgggagatcgtactctggccgagaacatcttctccaattctccgattgaagatgtagaactggcgaaacatctggtccgcaaaggctccttctttgagcaagacttggataccctgccgaactttacgtcggaagggtatggttcaattcgtcgtgtgtatgtttacggcgaagaagaccagatctttagccgcgattttcagttatggcaaattaataattataagcctgataaagtgtactgtgtaccgagtgctgaccacaagattcagtttagcaaagtcaacgagctggcccagattctccaagaagttgcaaactctgcgagtgatcttcttgcagtggct

SEQ ID NO: 746 - protein, 263 aa, synthetic construct
  REGION 1..263: note = Round 2 (Selectivity)
MVSAHFILVHSIGHGAWLWYKLIPLLQSAGHNATAIDLWASGIDPRQLEQIGTWEQYSEPLFTLIESLPEGEKVILVGESGGGINIALAAEKYPEKVSALVFHNALMPDIDHSPAFVYKKFSEVFTDWKDSIFSNYTYGNDTVTAVELGDRTLAENIFSNSPIEDVELAKHLVRKGSFFEQDLDTLPNFTSEGYGSIRRVYVYGEEDQIFSRDFQLWQINNYKPDKVYCVPSADHKIQFSKVNELAQILQEVANSASDLLAVA

SEQ ID NO: 747 - DNA, 789 bp, synthetic construct
  misc_feature 1..789: note = Round 2 (Selectivity)
  source 1..789: mol_type = other DNA
atggttagtgcgcattttattctgatccacagtatttgccatggcgcctggtgctggtataaactgatcccgttattacagtctgcaggtcataacgttacggcgattgatctttgggctagcgggatcgaccctcgccaactggaacagattggcacatgggagcagtactcagaaccattgttcaccctgatcgaatcgattccggaaggtaagaaagtcattctggtaggagaatccggtggcggcatcaatattgcactggccgcggagaaatatccggagaaagtgagcgccctcgtctttcacaacgcacttatgcccgatatcgatcacagtccagcgttcgtgtataagaaatatagcgaagttttcactgactggaaagattcgatcttcagcaattatacctacggtaacgacacggttaccgcggtggaattgggagatcgtactctggccgagaacatcttctccaattctccgattgaagatgtagaactggcgaaacatctggtccgccctggctccttctttgagcaagacttggataccctgccgaactttacgtcggaagggtatggttcaattcgtcgtgtgtatgtttacggcgaagaagaccagatctttagccgcgattttcagttatggcaaattaataattataagcctgataaagtgtactgtgtcccgagtgctgaccacaagattcagatcagcaaagtcaacgagctggcccagattctccaagaagttgcaaactctgcgagtgatcttcttgcagtggct

SEQ ID NO: 748 - protein, 263 aa, synthetic construct
  REGION 1..263: note = Round 2 (Selectivity)
MVSAHFILIHSICHGAWCWYKLIPLLQSAGHNVTAIDLWASGIDPRQLEQIGTWEQYSEPLFTLIESIPEGKKVILVGESGGGINIALAAEKYPEKVSALVFHNALMPDIDHSPAFVYKKYSEVFTDWKDSIFSNYTYGNDTVTAVELGDRTLAENIFSNSPIEDVELAKHLVRPGSFFEQDLDTLPNFTSEGYGSIRRVYVYGEEDQIFSRDFQLWQINNYKPDKVYCVPSADHKIQISKVNELAQILQEVANSASDLLAVA

SEQ ID NO: 749 - DNA, 789 bp, synthetic construct
  misc_feature 1..789: note = Round 2 (Selectivity)
  source 1..789: mol_type = other DNA
atggttagtgcgcattttattctgatccacagtatttgccatggcgcctggtgctggtataaactgatcccgttattacagtctgcaggtcataacgttacggcgattgatcttgtggctagcgggatcgaccctcgccaactggaacagattggcacatgggagcagtactcagaaccattgttcaccctgatcgaatcgattccggaaggtaagaaagtcattctggtaggagaatccggtggcggcatcaatattgcactggccgcggagaaatatccggagaaagtgagcgccctcgtctttcacaacgcacttatgcccgatatcgatcacagtccagcgttcgtgtataagaaatatagcgaagttttcactgactggaaagattcgatcttcagcaattatacctacggtaacgacacggttaccgcggtggaattgggagatcgtactctggccgagaacatcttctccaattctccgattgaagatgtagaactggcgaaacatctggtccgcaaaggctccttctttgagcaagacttggataccctgccgaactttacgtcggaagggtatggttcaattcgtcgtgtgtatgtttacggcgaagaagaccagatcatgagccgcgattttcagttatggcaaattaataattataagcctgataaagtgtactgtatcccgagtgctgaccacaagattcagatcagcaaagtcaacgagctggcccagattctccaagaagttgcaaactctgcgagtgatcttcttgcagtggct

SEQ ID NO: 750 - protein, 263 aa, synthetic construct
  REGION 1..263: note = Round 2 (Selectivity)
MVSAHFILIHSICHGAWCWYKLIPLLQSAGHNVTAIDLVASGIDPRQLEQIGTWEQYSEPLFTLIESIPEGKKVILVGESGGGINIALAAEKYPEKVSALVFHNALMPDIDHSPAFVYKKYSEVFTDWKDSIFSNYTYGNDTVTAVELGDRTLAENIFSNSPIEDVELAKHLVRKGSFFEQDLDTLPNFTSEGYGSIRRVYVYGEEDQIMSRDFQLWQINNYKPDKVYCIPSADHKIQISKVNELAQILQEVANSASDLLAVA

SEQ ID NO: 751 - DNA, 789 bp, synthetic construct
  misc_feature 1..789: note = Round 2 (Selectivity)
  source 1..789: mol_type = other DNA
atggttagtgcgcattttattctgatccacagtatttgccatggcgcctggctgtggtataaactgatcccgttattacagtctgcaggtcataacgttacggcgattgatcttggggctagcgggatcaaccctcgccaactggaacagattggcacatgggagcagtactcagaaccattgttcaccctgatcgaatcgattccggaaggtaagaaagtcattctggtaggagaatccggtggcggcatcaatattgcactggccgcggagaaatatccggagaaagtgagcgccctcgtctttcacaacgcacttatgcccgatatcgatcacagtccagcgttcgtgtataagaaatggagcgaagttttcactgactggaaagattcgatcttcagcaattatacctacggtaacgacacggttaccgcggtggaattgggagatcgtgctctggccgagaacatcttctccaattctccgattgaagatgtagaactggcgaaacatctggtccgcaaaggctccttctttgagcaagacttggataccctgccgaactttacgtcggaagggtatggttcaattcgtcgtgtgtatgtttacggcgaagaagaccagatctttagccgcgattttcagttatggcaaattaataattataagcctgataaagtgtactgtgtaccgagtgctgaccacaagattcagatcagcaaagtcaacgagctggcccagattctccaagaagttgcaaactctgcgagtgatcttcttgcagtggct

SEQ ID NO: 752 - protein, 263 aa, synthetic construct
  REGION 1..263: note = Round 2 (Selectivity)
MVSAHFILIHSICHGAWLWYKLIPLLQSAGHNVTAIDLGASGINPRQLEQIGTWEQYSEPLFTLIESIPEGKKVILVGESGGGINIALAAEKYPEKVSALVFHNALMPDIDHSPAFVYKKWSEVFTDWKDSIFSNYTYGNDTVTAVELGDRALAENIFSNSPIEDVELAKHLVRKGSFFEQDLDTLPNFTSEGYGSIRRVYVYGEEDQIFSRDFQLWQINNYKPDKVYCVPSADHKIQISKVNELAQILQEVANSASDLLAVA

SEQ ID NO: 753 - DNA, 789 bp, synthetic construct
  misc_feature 1..789: note = Round 2 (Selectivity)
  source 1..789: mol_type = other DNA
atggttagtgcgcattttattctgattcacagtattggtcatggcgcctggctctggtataaactgatcccgttattacagtctgcaggtcataacgctacggcgattgatctttgggctagcgggatcgaccctcgccaactggaacagattggcacatgggagcagtactcagaaccattgttcaccctgatcgaatcgattccggaaggtaagaaagtcattctggtaggagaatccggtggcggcatcaatattgcactggccgcggagaaatatccggagaaagtgagcgccctcgtctttcacaacgcacttatgcccgatatcgatcacagtccagcgttcgtgtacaagaaatttagcgaagttttcactgactggaaagattcgatcttcagcaattatacctacggtaacgacacggttaccgcggtggaattgggagatcgtactctggccgagaacatcttctccaattctccgattgaagatgtagaactggcgaaacatctggtccgcaaaggctccttctttgagcaagacttggataccctgccgaactttacgtcggaagggtatggttcaattcgtcgtgtgtatgtttacggcgaagaagaccagatctttagccgcgattttcagttatggcaaattaataattataagcctgataaagtgtactgtgtaccgagtgctgaccacaagattcagtttagcaaagtcaacgagctggcccagattctccaagaagttgcaaactctgcgagtgatcttcttgcagtggct

SEQ ID NO: 754 - protein, 263 aa, synthetic construct
  REGION 1..263: note = Round 2 (Selectivity)
MVSAHFILIHSIGHGAWLWYKLIPLLQSAGHNATAIDLWASGIDPRQLEQIGTWEQYSEPLFTLIESIPEGKKVILVGESGGGINIALAAEKYPEKVSALVFHNALMPDIDHSPAFVYKKFSEVFTDWKDSIFSNYTYGNDTVTAVELGDRTLAENIFSNSPIEDVELAKHLVRKGSFFEQDLDTLPNFTSEGYGSIRRVYVYGEEDQIFSRDFQLWQINNYKPDKVYCVPSADHKIQFSKVNELAQILQEVANSASDLLAVA

SEQ ID NO: 755 - DNA, 789 bp, synthetic construct
  misc_feature 1..789: note = Round 2 (Selectivity)
  source 1..789: mol_type = other DNA
atggttagtgcgcattttattctggttcacagtattggtcatggcgcctggctctggtataaactgatcccgttattacagtctgcaggtcataacgctacggcgattgatcttgtagctagcgggatcgaccctcgccaactggaacagattggcacatgggagcagtactcagaaccattgttcaccctgatcgaatcgctgccggaaggtaaaaaagtcattctggtaggagaatccggtggcggcatcaatattgcactggccgcggagaaatatccggagaaaattagcgccctcgtctttcacaacgcacttatgcccgatatcgatcacagtccagcgttcgtgtacaagaaatttagcgaagttttcactgactggaaagattcgatcttcgataattatacctacggtaacgacacggttaccgcggtggaattgggagatcgtactctggccgagaacatcttctccaattctccgattgaagatgtagaactggcgaaacatctggtccgcaaaggctccttctttgagcaagacttggataccctgccgaactttacgtcggaagggtatggttcaattcgtcgtgtgtatgtttacggcgaagaagaccagatctttagccgcgattttcagttatggcaaattaataattataagcctgataaagtgtactgtgtaccgagtgctgaccacaagattcagtttagcaaagtcaacgagctggcccagattctccaagaagttgcaaactctgcgagtgatcttcttgcagtggct

SEQ ID NO: 756 - protein, 263 aa, synthetic construct
  REGION 1..263: note = Round 2 (Selectivity)
MVSAHFILVHSIGHGAWLWYKLIPLLQSAGHNATAIDLVASGIDPRQLEQIGTWEQYSEPLFTLIESLPEGKKVILVGESGGGINIALAAEKYPEKISALVFHNALMPDIDHSPAFVYKKFSEVFTDWKDSIFDNYTYGNDTVTAVELGDRTLAENIFSNSPIEDVELAKHLVRKGSFFEQDLDTLPNFTSEGYGSIRRVYVYGEEDQIFSRDFQLWQINNYKPDKVYCVPSADHKIQFSKVNELAQILQEVANSASDLLAVA

SEQ ID NO: 757 - DNA, 789 bp, synthetic construct
  misc_feature 1..789: note = Round 2 (Selectivity)
  source 1..789: mol_type = other DNA
atggttagtgcgcattttattctggttcacagtattggtcatggcgcctggctctggtataaactgatcccgttattacagtctgcaggtcataacgctacggcgattgatctttgggctagcgggatcgaccctcgccaactggaacagattggcacatgggagcagtactcagaaccattgttcaccctgatcgaatcgctgccggaaggtaaaaaagtcattctggtaggagaatccggtggcggcatcaatattgcactggccgcggagaaatatccggagaaagtgagcgccctcgtctttcacaacgcacttatgcccgatatcgatcacagtccagcgttcgtgtacaagaaatttagcgaagttttcactgactggaaagattcgatcttcagcaattatacctacggtaacgacacggttaccgcggtggaattgggagatcgtactctggccgagaacatcttctccaattctccgattgaagatgtagaactggcgaaacatctggtccgcaaaggctccttctttgagcaagacttggataccctgccgaactttacgtcggaagggtatggttcaattcgtcgtgtgtatgtttacggcgaagaagaccagatctttagccgcgattttcagttatggcaaattaataattataagcctgataaagtgtactgtgtaccgagtgctgaccacaagattcagtttagcaaagtcaacgagctggcccagattctccaagaagttgcaaactctgcgagtgatcttcttgcagtggct

SEQ ID NO: 758 - protein, 263 aa, synthetic construct
  REGION 1..263: note = Round 2 (Selectivity)
MVSAHFILVHSIGHGAWLWYKLIPLLQSAGHNATAIDLWASGIDPRQLEQIGTWEQYSEPLFTLIESLPEGKKVILVGESGGGINIALAAEKYPEKVSALVFHNALMPDIDHSPAFVYKKFSEVFTDWKDSIFSNYTYGNDTVTAVELGDRTLAENIFSNSPIEDVELAKHLVRKGSFFEQDLDTLPNFTSEGYGSIRRVYVYGEEDQIFSRDFQLWQINNYKPDKVYCVPSADHKIQFSKVNELAQILQEVANSASDLLAVA

SEQ ID NO: 759 - DNA, 789 bp, synthetic construct
  misc_feature 1..789: note = Round 2 (Selectivity)
  source 1..789: mol_type = other DNA
atggttagtgcgcattttattctgattcacagtattggtcatggcgcctggctctggtataaactgatcccgttattacagtctgcaggtcataacgctacggcgattgatctttgggctagcgggatcgaccctcgccaactggaacagattggcacatgggagcagtactcagaaccattgttcaccctgatcgaatcgctgccggaaggtaaaaaagtcattctggtaggagaatccggtggcggcatcaatattgcactggccgcggagaaatatccggagaaagttagcgccctcgtctttcacaacgcacttatgcccgatatcgatcacagtccagcgttcgtgtacaagaaatttagtgaagttttcactgactggaaagattcgatcttcagcaattatacctacggtaacgacacggttaccgcggtggaattgggagatcgtactctggccgagaacatcttctccaattctccgattgaagatgtagaactggcgaaacatctggtccgcaaaggctccttctttgagcaagacttggataccctgccgaactttacgtcggaagggtatggttcaattcgtcgtgtgtatgtttacggcgaagaagaccagatctttagccgcgattttcagttatggcaaattaataattataaacctgataaagtgtactgtgtaccgagtgctgaccacaagattcagatcagcaaagtcaacgagctggcccagattctccaagaagttgcaaactctgcgagtgatcttcttgcagtggct

SEQ ID NO: 760 - protein, 263 aa, synthetic construct
  REGION 1..263: note = Round 2 (Selectivity)
MVSAHFILIHSIGHGAWLWYKLIPLLQSAGHNATAIDLWASGIDPRQLEQIGTWEQYSEPLFTLIESLPEGKKVILVGESGGGINIALAAEKYPEKVSALVFHNALMPDIDHSPAFVYKKFSEVFTDWKDSIFSNYTYGNDTVTAVELGDRTLAENIFSNSPIEDVELAKHLVRKGSFFEQDLDTLPNFTSEGYGSIRRVYVYGEEDQIFSRDFQLWQINNYKPDKVYCVPSADHKIQISKVNELAQILQEVANSASDLLAVA

SEQ ID NO: 761 - DNA, 789 bp, synthetic construct
  misc_feature 1..789: note = Round 2 (Selectivity)
  source 1..789: mol_type = other DNA
atggttagtgcgcattttattctgatccacagtatttgccatggcgcctggctctggtataaactgatcccgttattacagtctgcaggtcataacgctacggcgattgatcttgtggctagcgggatcgtgcctcgccaactggaacagattggcacatgggagcagtactcagaaccattgttcaccctgatcgaatcgattccggaaggtaagaaagtcattctggtaggagaatccggtggcggcatcaatattgcactggccgcggagaaatatccggagaaagtgagcgccctcgtctttcacaacgcacttatgcccgatatcgatcacagtccagcgttcgtgtacaagaaatttagcgaagttttcactgactggaaagattcgatcttcagcaattatacctacggtaacgacacggttaccgcggtggaattgggagatcgtactctggccgagaacatcttctccaattctccgattgaagatgtagaactggcgaaacatctggtccgcaaaggctccttctttgagcaagacttggataccctgccgaactttacgtcggaagggtatggttcaattcgtcgtgtgtatgtttacggcgaagaagaccagatctttagccgcgattttcagttatggcaaattaataattataagcctgataaagtgtactgtgtaccgagtgctgaccacaagattcagatcagcaaagtcaacgagctggcccagattctccaagaagttgcaaactctgcgagtgatcttcttgcagtggct

SEQ ID NO: 762 - protein, 263 aa, synthetic construct
  REGION 1..263: note = Round 2 (Selectivity)
MVSAHFILIHSICHGAWLWYKLIPLLQSAGHNATAIDLVASGIVPRQLEQIGTWEQYSEPLFTLIESIPEGKKVILVGESGGGINIALAAEKYPEKVSALVFHNALMPDIDHSPAFVYKKFSEVFTDWKDSIFSNYTYGNDTVTAVELGDRTLAENIFSNSPIEDVELAKHLVRKGSFFEQDLDTLPNFTSEGYGSIRRVYVYGEEDQIFSRDFQLWQINNYKPDKVYCVPSADHKIQISKVNELAQILQEVANSASDLLAVA

SEQ ID NO: 763 - DNA, 789 bp, synthetic construct
  misc_feature 1..789: note = Round 2 (Selectivity)
  source 1..789: mol_type = other DNA
atggttagtgcgcattttattctgatccacagtatttgccatggcgcctggtgctggtataaactgatcccgttattacagtctgcaggtcataacgctacggcgattgatctttgggctagcgggatcgaccctcgccaactggaacagattggcacatgggagcagtactcagaaccattgttcaccctgatcgaatcgattccggaaggtaagaaagtcattctggtaggagaatccggtggcggcatcaatattgcactggccgcggagaaatatccggagaaagtgagcgccctcgtctttcacaacgcacttatgcccgatatcgatcacagtccagcgttcgtgtataagaaatggagcgaagttttcactgactggaaagattcgatcttcagcaattatacctacggtaacgacacggttaccgcggtggaattgggagatcgtactctggccgagaacatcttctccaattctccgattgaagatgtagaactggcgaaacatctggtccgcaaaggctccttctttgagcaagacttggataccctgccgaactttacgtcggaagggtatggttcagtccgtcgtgtgtatgtttacggcgaagaagaccagatcatgagccgcgattttcagttatggcaaattaataattataagcctgataaagtgtactgtgtaccgagtgctgaccacaagattcagatcagcaaagtcaacgagctggcccagattctccaagaagttgcaaactctgcgagtgatcttcttgcagtggct

SEQ ID NO: 764 - protein, 263 aa, synthetic construct
  REGION 1..263: note = Round 2 (Selectivity)
MVSAHFILIHSICHGAWCWYKLIPLLQSAGHNATAIDLWASGIDPRQLEQIGTWEQYSEPLFTLIESIPEGKKVILVGESGGGINIALAAEKYPEKVSALVFHNALMPDIDHSPAFVYKKWSEVFTDWKDSIFSNYTYGNDTVTAVELGDRTLAENIFSNSPIEDVELAKHLVRKGSFFEQDLDTLPNFTSEGYGSVRRVYVYGEEDQIMSRDFQLWQINNYKPDKVYCVPSADHKIQISKVNELAQILQEVANSASDLLAVA

SEQ ID NO: 765 - DNA, 789 bp, synthetic construct
  misc_feature 1..789: note = Round 2 (Selectivity)
  source 1..789: mol_type = other DNA
atggttagtgcgcattttattctgatccacagtatttgccatggcgcctggtgctggtataaactgatcccgttattacagtctgcaggtcataacgttacggcgattgatctttgggctagcgggatcgaccctcgccaactggaacagattggcacatgggagcagtactcagaaccattgttcaccctgatcgaatcgattccggaaggtaagaaagtcattctggtaggagaatccggtggcggcatcaatattgcactggccgcggagaaatatccggagaaagtgagcgccctcgtctttcacaacgcacttatgcccgatatcgatcgcagtccagcgttcgtgctgaagaaatggagcgaagttttcactgactggaaagattcgatcttcagcaattatacctacggtaacgacacggttaccgcggtggaattgggagatcgtactctggccgagaacatcttctccaattctccgattgaagatgtagaactggcgaaacatctggtccgcaagggctccttctttgagcaagacttggataccctgccgaactttacgtcggaagggtatggttcagtccgtcgtgtgtatgtttacggcgaagaagaccagatctttagccgcgattttcagttatggcaaattaataattataagcctgataaagtgtactgtgtcccgagtgctgaccacaagattcagatcagcaaagtcaacgagctggcccagattctccaagaagttgcaaactctgcgagtgatcttcttgcagtggct

SEQ ID NO: 766 - protein, 263 aa, synthetic construct
  REGION 1..263: note = Round 2 (Selectivity)
MVSAHFILIHSICHGAWCWYKLIPLLQSAGHNVTAIDLWASGIDPRQLEQIGTWEQYSEPLFTLIESIPEGKKVILVGESGGGINIALAAEKYPEKVSALVFHNALMPDIDRSPAFVLKKWSEVFTDWKDSIFSNYTYGNDTVTAVELGDRTLAENIFSNSPIEDVELAKHLVRKGSFFEQDLDTLPNFTSEGYGSVRRVYVYGEEDQIFSRDFQLWQINNYKPDKVYCVPSADHKIQISKVNELAQILQEVANSASDLLAVA

SEQ ID NO: 767 - DNA, 789 bp, synthetic construct
  misc_feature 1..789: note = Round 2 (Selectivity)
  source 1..789: mol_type = other DNA
atggttagtgcgcattttattctgatccacagtgcctgccatggcgcctggctctggtataaactgatcccgttattacagtctgcaggtcataacgctacggcgattgatcttgtcgctagcgggatcgaccctcgccaactggaacagattggcacatgggagcagtactcagaaccattgttcaccctgatcgaatcgattccggaaggtaagaaagtcattctggtaggagaatccggtggcggcatcaatattgcactggccgcggagaaatatccggagaaagtgagcgccctcgtctttagtaacgcacttatgcccgatatcgatcacagtccagcgttcgtgtacaagaaatttagcgaagttttcactgactggaaagattcgatcttcagcaattatacctacggtaacgacacggttaccgcggtggaattgggagatcgtactctggccgagaacatcttctccaattctccgattgaagatgtagaactggcgaaacatctggtccgcaaaggctccttctttgagcaagacttggataccctgccgaactttacgtcggaagggtatggttcaattcgtcgtgtgtatgtttacggcgaagaagaccagatctttagccgcgattttcagttatggcaaattaataattataagcctgataaagtgtactgtgtaccgagtgctgaccacaagattcagatcagcaaagtcaacgagctggcccagattctccaagaagttgcaaactctgcgagtgatcttcttgcagtggct

SEQ ID NO: 768 - protein, 263 aa, synthetic construct
  REGION 1..263: note = Round 2 (Selectivity)
MVSAHFILIHSACHGAWLWYKLIPLLQSAGHNATAIDLVASGIDPRQLEQIGTWEQYSEPLFTLIESIPEGKKVILVGESGGGINIALAAEKYPEKVSALVFSNALMPDIDHSPAFVYKKFSEVFTDWKDSIFSNYTYGNDTVTAVELGDRTLAENIFSNSPIEDVELAKHLVRKGSFFEQDLDTLPNFTSEGYGSIRRVYVYGEEDQIFSRDFQLWQINNYKPDKVYCVPSADHKIQISKVNELAQILQEVANSASDLLAVA

SEQ ID NO: 769 - DNA, 789 bp, synthetic construct
  misc_feature 1..789: note = Round 2 (Selectivity)
  source 1..789: mol_type = other DNA
atggttagtgcgcattttattctgatccacagtgcctgccatggcgcctggctctggtataaactgatcccgttattacagtctgcaggtcataacgctacggcgattgatcttgtggctagcgggatcgaccctcgccaactggaacagattggcacatgggagcagtactcagaaccattgttcaccctgatcgaatcgattccggaaggtaagaaagtcattctggtaggagaatccggtggcggcatcaatattgcactggccgcggagaaatatccggagaaagtgagcgccctcgtctttagtaacgcacttatgcccgatatcgatcacagtccagcgttcgtgtacaagaaatttagcgaagttttcactgactggaaagattcgatcttcagcaattatacctacggtaacgacacggttaccgcggtggaattgggaccacgtactctggccgagaacatcttctccaattctccgattgaagatgtagaactggcgaaacatctggtccgcaaaggctccttctttgagcaagacttggataccctgccgaactttacgtcggaagggtatggttcaattcgtcgtgtgtatgtttacggcgaagaagaccagatttttagccgcgattttcagttatggcaaattaataattataagcctgataaagtgtactgtgtaccgagtgctgaccacaagattcagatcagcaaagtcaacgagctggcccagattctccaagaagttgcaaactctgcgagtgatcttcttgcagtggct

SEQ ID NO: 770 - protein, 263 aa, synthetic construct
  REGION 1..263: note = Round 2 (Selectivity)
MVSAHFILIHSACHGAWLWYKLIPLLQSAGHNATAIDLVASGIDPRQLEQIGTWEQYSEPLFTLIESIPEGKKVILVGESGGGINIALAAEKYPEKVSALVFSNALMPDIDHSPAFVYKKFSEVFTDWKDSIFSNYTYGNDTVTAVELGPRTLAENIFSNSPIEDVELAKHLVRKGSFFEQDLDTLPNFTSEGYGSIRRVYVYGEEDQIFSRDFQLWQINNYKPDKVYCVPSADHKIQISKVNELAQILQEVANSASDLLAVA

SEQ ID NO: 771 - DNA, 789 bp, synthetic construct
  misc_feature 1..789: note = Round 2 (Selectivity)
  source 1..789: mol_type = other DNA
atggttagtgcgcattttattctgatccacagtatttgccatggcgcctggctctggtataaactgatcccgttattacagtctgcaggtcataacgctacggcgattgatcttgtggctagcgggatcgaccctcgccaactggaacagattggcacatgggagcagtactcagaaccattgttcaccctgatcgaatcgattccggaaggtaagaaagtcattctggtaggagaatccggtggcggcatcaatattgcactggccgcggagaaatatccggagaaagtgagcgccctcgtctttcacaacgcacttatgcccgatatcgatcacagtccagcgttcgtgtacaagaaatttagcgaagttttcactgactggaaagattcgatcttcagcaattatacctacggtaacgacacggttaccgcggtggaattgggagatcgtactctggccgagaacatcttctccaattctccgattgaagatgtagaactggcgaaacatgcggtccgcaaaggctccttctttgagcaagacttggataccctgccgaactttacgtcggaagggtatggttcaattcgtcgtgtgtatgtttacggcgaagaagaccagatctttagccgcgattttcagttatggcaaattaataattataagcctgataaagtgtactgtgtaccgagtgctgaccacaagattcagatcagcaaagtcaacgagctggcccagattctccaagaagttgcaaactctgcgagtgatcttcttgcagtggct

SEQ ID NO: 772 - protein, 263 aa, synthetic construct
  REGION 1..263: note = Round 2 (Selectivity)
MVSAHFILIHSICHGAWLWYKLIPLLQSAGHNATAIDLVASGIDPRQLEQIGTWEQYSEPLFTLIESIPEGKKVILVGESGGGINIALAAEKYPEKVSALVFHNALMPDIDHSPAFVYKKFSEVFTDWKDSIFSNYTYGNDTVTAVELGDRTLAENIFSNSPIEDVELAKHAVRKGSFFEQDLDTLPNFTSEGYGSIRRVYVYGEEDQIFSRDFQLWQINNYKPDKVYCVPSADHKIQISKVNELAQILQEVANSASDLLAVA

SEQ ID NO: 773 - DNA, 789 bp, synthetic construct
  misc_feature 1..789: note = Round 2 (Selectivity)
  source 1..789: mol_type = other DNA
atggttagtgcgcattttattctgatccacagtatttgccatggcgcctggtgctggtataaactgatcccgttattacagtctgcaggtcataacgctacggcgattgatcttgtggctagcgggatcgaccctcgccaactggaacagattggcacatgggagcagtactcagaaccattgttcaccctgatcgaatcgattccggaaggtaagaaagtcattctggtaggagaatccggtggcggcatcaatattgcactggccgcggagaaatatccggagaaagtgagcgccctcgtctttcacaacgcacttatgcccgatatcgatcacagtccagcgttcgtgtataagaaagttagcgaagttttcactgactggaaagattcgatcttcagcaattatacctacggtaacgacacggttaccgcggtggaattgggagatcgtactctggccgagaacatcttctccaattctccgattgaagatgtagaactggcgaaacatctggtccgccctggctccttctttgagcaagacttggataccctgccgaactttacgtcggaagggtatggttcaatccgtcgtgtgtatgtttacggcgaagaagaccagatctttagccgcgattttcagttatggcaaattaataattataagcctgataaagtgtactgtgtcccgagtgctgaccacaagattcagatcagcaaagtcaacgagctggcccagattctccaagaagttgcaaactctgcgagtgatcttcttgcagtggct

SEQ ID NO: 774 - protein, 263 aa, synthetic construct
  REGION 1..263: note = Round 2 (Selectivity)
MVSAHFILIHSICHGAWCWYKLIPLLQSAGHNATAIDLVASGIDPRQLEQIGTWEQYSEPLFTLIESIPEGKKVILVGESGGGINIALAAEKYPEKVSALVFHNALMPDIDHSPAFVYKKVSEVFTDWKDSIFSNYTYGNDTVTAVELGDRTLAENIFSNSPIEDVELAKHLVRPGSFFEQDLDTLPNFTSEGYGSIRRVYVYGEEDQIFSRDFQLWQINNYKPDKVYCVPSADHKIQISKVNELAQILQEVANSASDLLAVA

SEQ ID NO: 775 - DNA, 789 bp, synthetic construct
  misc_feature 1..789: note = Round 2 (Selectivity)
  source 1..789: mol_type = other DNA
atggttagtgcgcattttattctgatccacagtatttgccatggcgcctggtgctggtataaactgatcccgttattacagtctgcaggtcataacgctacggcgattgatcttgtggctagcgggatcgaccctcgccaactggaacagattggcacatgggagcagtactcagaaccattgttcaccctgatcgaatcgattccggaaggtaagaaagtcattctggtaggagaatccggtggcggcatcaatattgcactggccgcggagaaatatccggagaaagtgagcgccctcgtctttcacaacgcacttatgcccgatatcgatcacagtccagcgttcgtgtataagaaagttagcgaagttttcactgactggaaagattcgatcttcagcaattatacctacggtaacgacacggttaccgcggtggaattgggagatcgtactctggccgagaacatcttctccaattctccgattgaagatgtagaactggcgaaacatctggtccgcaaaggctccttctttgagcaagacttggataccctgccgaactttacgtcggaagggtatggttcaattcgtcgtgtgtatgtttacggcgaagaagaccagatctttagccgcgattttcagttatggcaaattaataattataagcctgataaagtgtactgtgtaccgagtgctgaccacaagattcagatcagcaaagtcaacgagctggcccagattctccaagaagttgcaaactctgcgagtgatcttcttgcagtggct

SEQ ID NO: 776 - protein, 263 aa, synthetic construct
  REGION 1..263: note = Round 2 (Selectivity)
MVSAHFILIHSICHGAWCWYKLIPLLQSAGHNATAIDLVASGIDPRQLEQIGTWEQYSEPLFTLIESIPEGKKVILVGESGGGINIALAAEKYPEKVSALVFHNALMPDIDHSPAFVYKKVSEVFTDWKDSIFSNYTYGNDTVTAVELGDRTLAENIFSNSPIEDVELAKHLVRKGSFFEQDLDTLPNFTSEGYGSIRRVYVYGEEDQIFSRDFQLWQINNYKPDKVYCVPSADHKIQISKVNELAQILQEVANSASDLLAVA

SEQ ID NO: 777 - DNA, 789 bp, synthetic construct
  misc_feature 1..789: note = Round 2 (Selectivity)
  source 1..789: mol_type = other DNA
atggttagtgcgcattttattctgatccacagtatttgccatggcgcctggtgctggtataaactgatcccgttattacagtctgcaggtcataacgctacggcgattgatctttgggctagcgggatcgaccctcgccaactggaacagattggcacatgggagcagtactcagaaccattgttcaccctgatcgaatcgattccggaaggtaagaaagtcattctggtaggagaatccggtggcggcatcaatattgcactggccgcggagaaatatccggagaaagtgagcgccctcgtctttcacaacgcacttatgcccgatatcgatcacagtccagcgttcgtgtataagaaatggagcgaagttttcactgactggaaagattcgatcttcagcaattatacctacggtaacgacacggttaccgcggtggaattgggagatcgtactctggccgagaacatcttctccaattctccgattgaagatgtagaactggcgaaacatctggtccgccctggctccttctttgagcaagacttggataccctgccgaactttacgtcggaagggtatggttcaattcgtcgtgtgtatgtttacggcgaagaagaccagatcatgagccgcgattttcagttatggcaaattaataattataagcctgataaagtgtactgtgtaccgagtgctgaccacaagattcagatcagcaaagtcaacgagctggcccagattctccaagaagttgcaaactctgcgagtgatcttcttgcagtggct

SEQ ID NO: 778 - protein, 263 aa, synthetic construct
  REGION 1..263: note = Round 2 (Selectivity)
MVSAHFILIHSICHGAWCWYKLIPLLQSAGHNATAIDLWASGIDPRQLEQIGTWEQYSEPLFTLIESIPEGKKVILVGESGGGINIALAAEKYPEKVSALVFHNALMPDIDHSPAFVYKKWSEVFTDWKDSIFSNYTYGNDTVTAVELGDRTLAENIFSNSPIEDVELAKHLVRPGSFFEQDLDTLPNFTSEGYGSIRRVYVYGEEDQIMSRDFQLWQINNYKPDKVYCVPSADHKIQISKVNELAQILQEVANSASDLLAVA

SEQ ID NO: 779 - DNA, 789 bp, synthetic construct
  misc_feature 1..789: note = Round 2 (Selectivity)
  source 1..789: mol_type = other DNA
atggttagtgcgcattttattctgatccacagtatttgccatggcgcctggctctggtataaactgatcccgttattacagtctgcaggtcataacgctacggcgattgatcttgtggctagcgggatcgaccctcgccaactggaacagattggcacatgggagcagtactcagaaccattgttcaccctgatcgaatcgattccggaaggtaagaaagtcattctggtaggagaatccggtggcggcatcaatattgcactggccgcggagaaatatccggagaaagtgagcgccctcgtctttcacaacgcacttatgcccgatatcgatcacagtccagcgttcgtgtataagaaagttagcgaagttttcactgactggaaagattcgatcttcagcaattatacctacggtaacgacacggttaccgcggtggaattgggagatcgtactctggccgagaacatcttctccaattctccgattgaagatgtagaactggcgaaacatctggtccgcaaaggctccttctttgagcaagacttggataccctgccgaactttacgtcggaagggtatggttcaattcgtcgtgtgtatgtttacggcgaagaagaccagatctttagccgcgattttcagttatggcaaattaataattataagcctgataaagtgtactgtgtaccgagtgctgaccacaagattcagatcagcaaagtcaacgagctggcccagattctccaagaagttgcaaactctgcgagtgatcttcttgcagtggct

SEQ ID NO: 780 - protein, 263 aa, synthetic construct
  REGION 1..263: note = Round 2 (Selectivity)
MVSAHFILIHSICHGAWLWYKLIPLLQSAGHNATAIDLVASGIDPRQLEQIGTWEQYSEPLFTLIESIPEGKKVILVGESGGGINIALAAEKYPEKVSALVFHNALMPDIDHSPAFVYKKVSEVFTDWKDSIFSNYTYGNDTVTAVELGDRTLAENIFSNSPIEDVELAKHLVRKGSFFEQDLDTLPNFTSEGYGSIRRVYVYGEEDQIFSRDFQLWQINNYKPDKVYCVPSADHKIQISKVNELAQILQEVANSASDLLAVA

SEQ ID NO: 781 - DNA, 789 bp, synthetic construct
  misc_feature 1..789: note = Round 2 (Selectivity)
  source 1..789: mol_type = other DNA
atggttagtgcgcattttattctgattcacagtatttgtcatggcgcctggctctggtataaactgatcccgttattacagtctgcaggtcataacgctacggcgattgatcttggggctagcgggatcgaccctcgccaactggaacagattggcacatgggagcagtactcagaaccattgttcaccctgatcgaatcgctgccggaaggtgaaaaagtcattctggtaggagaatccggtggcggcatcaatattgcactggccgcggagaaatatccggagaaagtgagcgccctcgtctttcacaacgcacttatgcccgatatcgatcacagtccagcgttcgtgtacaagaaatttagcgaagttttcactgactggaaagattcgatcttcagcaattatacctacggtaacgacacggttaccgcggtggaattgggagatcgtactctggccgagaacatcttctccaattctccgattgaagatgtagaactggcgaaacatctggtccgcaaaggctccttctttgagcaagacttggataccctgccgaactttacgtcggaagggtatggttcaattcgtcgtgtgtatgtttacggcgaagaagaccagatctttagccgcgattttcagttatggcaaattaataattataagcctgataaagtgtactgtgtaccgagtgctgaccacaagattcagtttagcaaagtcaacgagctggcccagattctccaagaagttgcaaactctgcgagtgatcttcttgcagtggct

SEQ ID NO: 782 - protein, 263 aa, synthetic construct
  REGION 1..263: note = Round 2 (Selectivity)
MVSAHFILIHSICHGAWLWYKLIPLLQSAGHNATAIDLGASGIDPRQLEQIGTWEQYSEPLFTLIESLPEGEKVILVGESGGGINIALAAEKYPEKVSALVFHNALMPDIDHSPAFVYKKFSEVFTDWKDSIFSNYTYGNDTVTAVELGDRTLAENIFSNSPIEDVELAKHLVRKGSFFEQDLDTLPNFTSEGYGSIRRVYVYGEEDQIFSRDFQLWQINNYKPDKVYCVPSADHKIQFSKVNELAQILQEVANSASDLLAVA

SEQ ID NO: 783 - DNA, 789 bp, synthetic construct
  misc_feature 1..789: note = Round 2 (Selectivity)
  source 1..789: mol_type = other DNA
atggttagtgcgcattttattctgatccacagtatttgccatggcgcctggctctggaagaaactgatcccgttattacagtctgcaggtcataacgctacggcgattgatcttgtggctagcgggatcgaccctcgccaactggaacagattggcacatgggagcagtactcagaaccattgttcaccctgatcgaatcgattccggaaggtaagaaagtcattctggtaggagaatccggtggcggcatcaatattgcactggccgcggagaaatatccggagaaagtgagcgccctcgtctttcacaacgcacttatgcccgatatcgatcacagtccagcgttcgtgtacaagaaatttagcgaagttttcactgactggaaagattcgatcttcagcaattatacctacggtaacgacacggttaccgcggtggaattgggagatcgtactctggccgagaacatcttctccaattctccgattgaagatgtagaactggcgaaacatctggtccgcaaaggctccttctttgagcaagacttggataccctgccgaactttacgtcggaagggtatggttcaattcgtcgtgtgtatgtttacggcgaagaagaccagatctttagccgcgattttcagttatggcaaattaataattataagcctgataaagtgtactgtgtaccgagtgctgaccacaagattcagatcagcaaagtcaacgagctggcccagattctccaagaagttgcaaactctgcgagtgatcttcttgcagtggct

SEQ ID NO: 784 - protein, 263 aa, synthetic construct
  REGION 1..263: note = Round 2 (Selectivity)
MVSAHFILIHSICHGAWLWKKLIPLLQSAGHNATAIDLVASGIDPRQLEQIGTWEQYSEPLFTLIESIPEGKKVILVGESGGGINIALAAEKYPEKVSALVFHNALMPDIDHSPAFVYKKFSEVFTDWKDSIFSNYTYGNDTVTAVELGDRTLAENIFSNSPIEDVELAKHLVRKGSFFEQDLDTLPNFTSEGYGSIRRVYVYGEEDQIFSRDFQLWQINNYKPDKVYCVPSADHKIQISKVNELAQILQEVANSASDLLAVA

SEQ ID NO: 785 - DNA, 789 bp, synthetic construct
  misc_feature 1..789: note = Round 2 (Selectivity)
  source 1..789: mol_type = other DNA
atggttagtgcgcattttattctgatccacagtattttccatggcgcctggctctggtataaactgatcccgttattacagtctgcaggtcataacgctacggcgattgatcttgtggctagcgggatcgaccctcgccaactggaacagattggcacatgggagcagtactcagaaccattgttcaccctgatcgaatcgattccggaaggtaagaaagtcattctggtaggagaatccggtggcggcatcaatattgcactggccgcggagaaatatccggagaaagtgagcgccctcgtctttcacaacgcacttatgcccgatatcgatcacagtccagcgttcgtgtacaagaaatttagcgaagttttcactgactggaaagattcgatcttcagcaattatacctacggtaacgacacggttaccgcggtggaattgggagatcgtactctggccgagaacatcttctccaattctccgattgaagatgtagaactggcgaaacatctggtccgcaaaggctccttctttgagcaagacttggataccctgccgaactttacgtcggaagggtatggttcaattcgtcgtgtgtatgtttacggcgaagaagaccagatctttagccgcgattttcagttatggcaaattaataattataagcctgataaagtgtactgtgtaccgagtgctgaccacaagattcagatcagcaaagtcaacgagctggcccagattctccaagaagttgcaaactctgcgagtgatcttcttgcagtggct

SEQ ID NO: 786 - protein, 263 aa, synthetic construct
  REGION 1..263: note = Round 2 (Selectivity)
MVSAHFILIHSIFHGAWLWYKLIPLLQSAGHNATAIDLVASGIDPRQLEQIGTWEQYSEPLFTLIESIPEGKKVILVGESGGGINIALAAEKYPEKVSALVFHNALMPDIDHSPAFVYKKFSEVFTDWKDSIFSNYTYGNDTVTAVELGDRTLAENIFSNSPIEDVELAKHLVRKGSFFEQDLDTLPNFTSEGYGSIRRVYVYGEEDQIFSRDFQLWQINNYKPDKVYCVPSADHKIQISKVNELAQILQEVANSASDLLAVA

SEQ ID NO: 787 - DNA, 789 bp, synthetic construct
  misc_feature 1..789: note = Round 2 (Selectivity)
  source 1..789: mol_type = other DNA
atggttagtgcgcattttattctgatccacagtatttgccatggcgcctggtgctggtataaactgatcccgttattacagtctgcaggtcataacgttacggcgattgatctttgggctagcgggatcgaccctcgccaactggaacagattggcacatgggagcagtactcagaaccattgttcaccctgatcgaatcgattccggaaggtaagaaagtcattctggtaggagaatccggtggcggcatcaatattgcactggccgcggagaaatatccggagaaagtgagcgccctcgtctttcacaacgcacttatgcccgatatcgatcacagtccagcgttcgtgtataagaaatggagcgaagttttcactgactggaaagattcgatcttcagcaattatacctacggtaacgacacggttaccgcggtggaattgggagatcgtactctggccgagaacatcttctccaattctccgattgaagatgtagaactggcgaaacatctggtccgccctggctccttctttgagcaagacttggataccctgccgaactttacgtcggaagggtatggttcaatccgtcgtgtgtatgtttacggcgaagaagaccagatcatgagccgcgattttcagttatggcaaattaataattataagcctgataaagtgtactgtgtaccgagtgctgaccacaagattcagatcagcaaagtcaacgagctggcccagattctccaagaagttgcaaactctgcgagtgatcttcttgcagtggct

SEQ ID NO: 788 - protein, 263 aa, synthetic construct
  REGION 1..263: note = Round 2 (Selectivity)
MVSAHFILIHSICHGAWCWYKLIPLLQSAGHNVTAIDLWASGIDPRQLEQIGTWEQYSEPLFTLIESIPEGKKVILVGESGGGINIALAAEKYPEKVSALVFHNALMPDIDHSPAFVYKKWSEVFTDWKDSIFSNYTYGNDTVTAVELGDRTLAENIFSNSPIEDVELAKHLVRPGSFFEQDLDTLPNFTSEGYGSIRRVYVYGEEDQIMSRDFQLWQINNYKPDKVYCVPSADHKIQISKVNELAQILQEVANSASDLLAVA

SEQ ID NO: 789 - DNA, 789 bp, synthetic construct
  misc_feature 1..789: note = Round 2 (Selectivity)
  source 1..789: mol_type = other DNA
atggttagtgcgcattttattctgatccacagtatttgccatggcgcctggatctggtataaactgatcccgttattacagtctgcaggtcataacgctacggcgattgatctttgggctagcgggatcaaccctcgccaactggaacagattggcacatgggagcagtactcagaaccattgttcaccctgatcgaatcgattccggaaggtaagaaagtcattctggtaggagaatccggtggcggcatcaatattgcactggccgcggagaaatatccggagaaagtgagcgccctcgtctttcacaacgcacttatgcccgatatcgatcacagtccagcgttcgtgtataagaaagttagcgaagttttcactgactggaaagattcgatcttcagcaattatacctacggtaacgacacggttaccgcggtggaattgggagatcgtactctggccgagaacatcttctccaattctccgattgaagatgtagaactggcgaaacatctggtccgccctggctccttctttgagcaagacttggataccctgccgaactttacgtcggaagggtatggttcaatccgtcgtgtgtatgtttacggcgaagaagaccagatcatgagccgcgattttcagttatggcaaattaataattataagcctgataaagtgtactgtgtcccgagtgctgaccacaagattcagatcagcaaagtcaacgagctggcccagattctccaagaagttgcaaactctgcgagtgatcttcttgcagtggct

SEQ ID NO: 790 - protein, 263 aa, synthetic construct
  REGION 1..263: note = Round 2 (Selectivity)
MVSAHFILIHSICHGAWIWYKLIPLLQSAGHNATAIDLWASGINPRQLEQIGTWEQYSEPLFTLIESIPEGKKVILVGESGGGINIALAAEKYPEKVSALVFHNALMPDIDHSPAFVYKKVSEVFTDWKDSIFSNYTYGNDTVTAVELGDRTLAENIFSNSPIEDVELAKHLVRPGSFFEQDLDTLPNFTSEGYGSIRRVYVYGEEDQIMSRDFQLWQINNYKPDKVYCVPSADHKIQISKVNELAQILQEVANSASDLLAVA

SEQ ID NO: 791 - DNA, 789 bp, synthetic construct
  misc_feature 1..789: note = Round 2 (Selectivity)
  source 1..789: mol_type = other DNA
atggttagtgcgcattttattctgatccacagtatttgccatggcgcctggatctggtataaactgatcccgttattacagtctgcaggtcataacgctacggcgattgatctttgggctagcgggatcgaccctcgccaactggaacagattggcacatgggagcagtactcagaaccattgttcaccctgatcgaatcgattccggaaggtaagaaagtcattctggtaggagaatccggtggcggcatcaatattgcactggccgcggagaaatatccggagaaagtgagcgccctcgtctttcacaacgcacttatgcccgatatcgatcacagtccagcgttcgtgctgaagaaatggagcgaagttttcactgactggaaagattcgatcttcagcaattatacctacggtaacgacacggttaccgcggtggaattgggagatcgtactctggccgagaacatcttctccaattctccgattgaagatgtagaactggcgaaacatctggtccgcaaaggctccttctttgagcaagacttggataccctgccgaactttacgtcggaagggtatggttcaattcgtcgtgtgtatgtttacggcgaagaagaccagatcatgagccgcgattttcagttatggcaaattaataattataagcctgataaagtgtactgtgtaccgagtgctgaccacaagattcagatcagcaaagtcaacgagctggcccagattctccaagaagttgcaaactctgcgagtgatcttcttgcagtggct

SEQ ID NO: 792 - protein, 263 aa, synthetic construct
  REGION 1..263: note = Round 2 (Selectivity)
MVSAHFILIHSICHGAWIWYKLIPLLQSAGHNATAIDLWASGIDPRQLEQIGTWEQYSEPLFTLIESIPEGKKVILVGESGGGINIALAAEKYPEKVSALVFHNALMPDIDHSPAFVLKKWSEVFTDWKDSIFSNYTYGNDTVTAVELGDRTLAENIFSNSPIEDVELAKHLVRKGSFFEQDLDTLPNFTSEGYGSIRRVYVYGEEDQIMSRDFQLWQINNYKPDKVYCVPSADHKIQISKVNELAQILQEVANSASDLLAVA

SEQ ID NO: 793 - DNA, 789 bp, synthetic construct
  misc_feature 1..789: note = Round 2 (Selectivity)
  source 1..789: mol_type = other DNA
atggttagtgcgcattttattctgatccacagtatttgccatggcgcctggctctggtataaactgatcccgttattacagtctgcaggtcataacgctacggcgattgatcttgtggctagcgggatcgaccctcgccaactggaacagattggcacatgggagcagtactcagaaccattgttcaccctgatcgaatcgattccggaaggtaagaaagtcattctggtaggagaatccggtggcggcatcaatattgcactggccgcggagaaatatccggagaaagtgagcgccctcgtctttcacaacgcacttatgcccgatatcgatcacagtccagcgttcgtgtacaagaaatttagcgaagttttcactgactggaaagattcgatcttcagcaattatacctacggtaacgacacggttaccgcggtggaatttggagatcgtactctggccgagaacatcttctccaattctccgattgaagatgtagaactggcgaaacatctggtccgcaaaggctccttctttgagcaagacttggataccctgccgaactttacgtcggaagggtatggttcaattcgtcgtgtgtatgtttacggcgaagaagaccagatctttagccgcgattttcagttatggcaaattaataattataagcctgataaagtgtactgtgtaccgagtgctgaccacaagattcagatcagcaaagtcaacgagctggcccagattctccaagaagttgcaaactctgcgagtgatcttcttgcagtggct

SEQ ID NO: 794 - protein, 263 aa, synthetic construct
  REGION 1..263: note = Round 2 (Selectivity)
MVSAHFILIHSICHGAWLWYKLIPLLQSAGHNATAIDLVASGIDPRQLEQIGTWEQYSEPLFTLIESIPEGKKVILVGESGGGINIALAAEKYPEKVSALVFHNALMPDIDHSPAFVYKKFSEVFTDWKDSIFSNYTYGNDTVTAVEFGDRTLAENIFSNSPIEDVELAKHLVRKGSFFEQDLDTLPNFTSEGYGSIRRVYVYGEEDQIFSRDFQLWQINNYKPDKVYCVPSADHKIQISKVNELAQILQEVANSASDLLAVA

SEQ ID NO: 795 - DNA, 789 bp, synthetic construct
  misc_feature 1..789: note = Round 2 (Selectivity)
  source 1..789: mol_type = other DNA
atggttagtgcgcattttattctgatccacagtatttgccatggcgcctggctctggtataaactgatcccgttattacagtctgcaggtcataacgctacggcgattgatcttgtggctagcgggatcgaccctcgccaactggaacagattggcacatgggagcagtactcagaaccattgttcaccctgatcgaatcgattccggaaggtaagaaagtcattctggtaggagaatccggtggcggcatcaatattgcactggccgcggagaaatatccggagaaagtgagcgccctcgtctttcacaacgcacttatgcccgatatcgatcacagtccagcgttcgtgtacaagaaatttagcgaagttttcactgactggaaagattcgatcttcagcaattatacctacggtaacgacacggttaccgcggtggaattgggagatcgtactctggccgagaacatcttctccaattctccgattgaagatgtagaactggcgaaacatggggtccgcaaaggctccttctttgagcaagacttggataccctgccgaactttacgtcggaagggtatggttcaattcgtcgtgtgtatgtttacggcgaagaagaccagatctttagccgcgattttcagttatggcaaattaataattataagcctgataaagtgtactgtgtaccgagtgctgaccacaagattcagatcagcaaagtcaacgagctggcccagattctccaagaagttgcaaactctgcgagtgatcttcttgcagtggct

SEQ ID NO: 796 - protein, 263 aa, synthetic construct
  REGION 1..263: note = Round 2 (Selectivity)
MVSAHFILIHSICHGAWLWYKLIPLLQSAGHNATAIDLVASGIDPRQLEQIGTWEQYSEPLFTLIESIPEGKKVILVGESGGGINIALAAEKYPEKVSALVFHNALMPDIDHSPAFVYKKFSEVFTDWKDSIFSNYTYGNDTVTAVELGDRTLAENIFSNSPIEDVELAKHGVRKGSFFEQDLDTLPNFTSEGYGSIRRVYVYGEEDQIFSRDFQLWQINNYKPDKVYCVPSADHKIQISKVNELAQILQEVANSASDLLAVA

SEQ ID NO: 797 - DNA, 789 bp, synthetic construct
  misc_feature 1..789: note = Round 2 (Selectivity)
  source 1..789: mol_type = other DNA
atggttagtgcgcattttattctgatccacagtatttgccatggcgtttggctctggtataaactgatcccgttattacagtctgcaggtcataacgctacggcgattgatcttgtggctagcgggatcgaccctcgccaactggaacagattggcacatgggagcagtactcagaaccattgttcaccctgatcgaatcgattccggaaggtaagaaagtcattctggtaggagaatccggtggcggcatcaatattgcactggccgcggagaaatatccggagaaagtgagcgccctcgtctttcacaacgcacttatgcccgatatcgatcacagtccagcgttcgtgtacaagaaatttagcgaagttttcactgactggaaagattcgatcttcagcaattatacctacggtaacgacacggttaccgcggtggaattgggagatcgtactctggccgagaacatcttctccaattctccgattgaagatgtagaactggcgaaacatctggtccgcaaaggctccttctttgagcaagacttggataccctgccgaactttacgtcggaagggtatggttcaattcgtcgtgtgtatgtttacggcgaagaagaccagatctttagccgcgattttcagttatggcaaattaataattataagcctgataaagtgtactgtgtaccgagtgctgaccacaagattcagatcagcaaagtcaacgagctggcccagattctccaagaagttgcaaactctgcgagtgatcttcttgcagtggct

SEQ ID NO: 798 - protein, 263 aa, synthetic construct
  REGION 1..263: note = Round 2 (Selectivity)
MVSAHFILIHSICHGVWLWYKLIPLLQSAGHNATAIDLVASGIDPRQLEQIGTWEQYSEPLFTLIESIPEGKKVILVGESGGGINIALAAEKYPEKVSALVFHNALMPDIDHSPAFVYKKFSEVFTDWKDSIFSNYTYGNDTVTAVELGDRTLAENIFSNSPIEDVELAKHLVRKGSFFEQDLDTLPNFTSEGYGSIRRVYVYGEEDQIFSRDFQLWQINNYKPDKVYCVPSADHKIQISKVNELAQILQEVANSASDLLAVA

SEQ ID NO: 799 - DNA, 789 bp, synthetic construct
  misc_feature 1..789: note = Round 2 (Selectivity)
  source 1..789: mol_type = other DNA
atggttagtgcgcattttattctgatccacagtatttgccatggcgcctggctctggtatgttctgatcccgttattacagtctgcaggtcataacgctacggcgattgatcttgtggctagcgggatcgaccctcgccaactggaacagattggcacatgggagcagtactcagaaccattgttcaccctgatcgaatcgattccggaaggtaagaaagtcattctggtaggagaatccggtggcggcatcaatattgcactggccgcggagaaatatccggagaaagtgagcgccctcgtctttcacaacgcacttatgcccgatatcgatcacagtccagcgttcgtgtacaagaaatttagcgaagttttcactgactggaaagattcgatcttcagcaattatacctacggtaacgacacggttaccgcggtggaattgggagatcgtactctggccgagaacatcttctccaattctccgattgaagatgtagaactggcgaaacatctggtccgcaaaggctccttctttgagcaagacttggataccctgccgaactttacgtcggaagggtatggttcaattcgtcgtgtgtatgtttacggcgaagaagaccagatctttagccgcgattttcagttatggcaaattaataattataagcctgataaagtgtactgtgtaccgagtgctgaccacaagattcagatcagcaaagtcaacgagctggcccagattctccaagaagttgcaaactctgcgagtgatcttcttgcagtggct

SEQ ID NO: 800 - protein, 263 aa, synthetic construct
  REGION 1..263: note = Round 2 (Selectivity)
MVSAHFILIHSICHGAWLWYVLIPLLQSAGHNATAIDLVASGIDPRQLEQIGTWEQYSEPLFTLIESIPEGKKVILVGESGGGINIALAAEKYPEKVSALVFHNALMPDIDHSPAFVYKKFSEVFTDWKDSIFSNYTYGNDTVTAVELGDRTLAENIFSNSPIEDVELAKHLVRKGSFFEQDLDTLPNFTSEGYGSIRRVYVYGEEDQIFSRDFQLWQINNYKPDKVYCVPSADHKIQISKVNELAQILQEVANSASDLLAVA

SEQ ID NO: 801 - DNA, 789 bp, synthetic construct; identical to SEQ ID NO: 521
  misc_feature 1..789: note = Round 2 (Selectivity)
  source 1..789: mol_type = other DNA

SEQ ID NO: 802 - protein, 263 aa, synthetic construct; identical to SEQ ID NO: 522
  REGION 1..263: note = Round 2 (Selectivity)

SEQ ID NO: 803 - DNA, 789 bp, synthetic construct
  misc_feature 1..789: note = Round 2 (Selectivity)
  source 1..789: mol_type = other DNA
atggttagtgcgcattttattctgatccacagtatttgccatggcgcctggctctggtataaactgatcccgttattacagtctgcaggtcataacgctacggcgattgatcttgtggctagcgggatcgaccctcgccaactggaacagattggcacatgggagcagtactcagaaccattgttcaccctgatcgaatcgattccggaaggtaagaaagtcattctggtaggagaatccggtggcggcatcaatattgcactggccgcggagaaatatccggagaaagtgagcgccctcgtctttcacaacgcacttatgcccgatatcgatcacagtccagcgttcgtgtacaagaaatttagcgaagttttcactgactggaaagattcgatcttcagcaattatacctacggtaacgacacggttaccgcggtggaattgggagatcgtactctggccgagaacatcttctccaattctccgattgaagatgtagaactggcgaaacatctggtccgcaaaggctccttctttgagcaagacttggataccctgccgaactttacgtcggaagggtatggttcaattcgtcgtgtgtatgtttacggcgaagaagaccagatctttagccgcgattttcagttatggcaaattaataattataagcctgataaagtgtactgtgtaccgagtgctgaccacaagattcagatcagcaaagtcaacgagggtgcccagattctccaagaagttgcaaactctgcgagtgatcttcttgcagtggct

SEQ ID NO: 804 - protein, 263 aa, synthetic construct
  REGION 1..263: note = Round 2 (Selectivity)
MVSAHFILIHSICHGAWLWYKLIPLLQSAGHNATAIDLVASGIDPRQLEQIGTWEQYSEPLFTLIESIPEGKKVILVGESGGGINIALAAEKYPEKVSALVFHNALMPDIDHSPAFVYKKFSEVFTDWKDSIFSNYTYGNDTVTAVELGDRTLAENIFSNSPIEDVELAKHLVRKGSFFEQDLDTLPNFTSEGYGSIRRVYVYGEEDQIFSRDFQLWQINNYKPDKVYCVPSADHKIQISKVNEGAQILQEVANSASDLLAVA

SEQ ID NO: 805 - DNA, 789 bp, synthetic construct
  misc_feature 1..789: note = Round 2 (Selectivity)
  source 1..789: mol_type = other DNA
atggttagtgcgcattttattctgatccacagtatttgccatggcgcctggctctggtataaactgatcccgttattacagtctgcaggtcataacgctacggcgattttgcttgtggctagcgggatcgaccctcgccaactggaacagattggcacatgggagcagtactcagaaccattgttcaccctgatcgaatcgattccggaaggtaagaaagtcattctggtaggagaatccggtggcggcatcaatattgcactggccgcggggaaatatccggagaaagtgagcgccctcgtctttcacaacgcacttatgcccgatatcgatcacagtccagcgttcgtgtacaagaaatttagcgaagttttcactgactggaaagattcgatcttcagcaattatacctacggtaacgacacggttaccgcggtggaattgggagatcgtactctggccgagaacatcttctccaattctccgattgaagatgtagaactggcgaaacatctggtccgcaaaggctccttctttgagcaagacttggataccctgccgaactttacgtcggaagggtatggttcaattcgtcgtgtgtatgtttacggcgaagaagaccagatctttagccgcgattttcagttatggcaaattaataattataagcctgataaagtgtactgtgtaccgagtgctgaccacaagattcagatcagcaaagtcaacgagctggcccagattctccaagaagttgcaaactctgcgagtgatcttcttgcagtggct

SEQ ID NO: 806 - protein, 263 aa, synthetic construct
  REGION 1..263: note = Round 2 (Selectivity)
MVSAHFILIHSICHGAWLWYKLIPLLQSAGHNATAILLVASGIDPRQLEQIGTWEQYSEPLFTLIESIPEGKKVILVGESGGGINIALAAGKYPEKVSALVFHNALMPDIDHSPAFVYKKFSEVFTDWKDSIFSNYTYGNDTVTAVELGDRTLAENIFSNSPIEDVELAKHLVRKGSFFEQDLDTLPNFTSEGYGSIRRVYVYGEEDQIFSRDFQLWQINNYKPDKVYCVPSADHKIQISKVNELAQILQEVANSASDLLAVA

SEQ ID NO: 807 - DNA, 789 bp, synthetic construct
  misc_feature 1..789: note = Round 2 (Selectivity)
  source 1..789: mol_type = other DNA
atggttagtgcgcattttattctgatccacagtatttgccatggcgcctggtgctggtataaactgatcccgttattacagtctgcaggtcataacgctacggcgattgatctttgggctagcgggatcaaccctcgccaactggaacagattggcacatgggagcagtactcagaaccattgttcaccctgatcgaatcgattccggaaggtaagaaagtcattctggtaggagaatccggtggcggcatcaatattgcactggccgcggagaaatatccggagaaagtgagcgccctcgtctttcacaacgcacttatgcccgatatcgatcacagtccagcgttcgtgtataagaaatatagcgaagttttcactgactggaaagattcgatcttcagcaattatacctacggtaacgacacggttaccgcggtggaattgggagatcgtactctggccgagaacatcttctccaattctccgattgaagatgtagaactggcgaaacatctggtccgccctggctccttctttgagcaagacttggataccctgccgaactttacgtcggaagggtatggttcaattcgtcgtgtgtatgtttacggcgaagaagaccagatcatgagccgcgattttcagttatggcaaattaataattataagcctgataaagtgtactgtgtcccgagtgctgaccacaagattcagatcagcaaagtcaacgagctggcccagattctccaagaagttgcaaactctgcgagtgatcttcttgcagtggct

SEQ ID NO: 808 - protein, 263 aa, synthetic construct
  REGION 1..263: note = Round 2 (Selectivity)
MVSAHFILIHSICHGAWCWYKLIPLLQSAGHNATAIDLWASGINPRQLEQIGTWEQYSEPLFTLIESIPEGKKVILVGESGGGINIALAAEKYPEKVSALVFHNALMPDIDHSPAFVYKKYSEVFTDWKDSIFSNYTYGNDTVTAVELGDRTLAENIFSNSPIEDVELAKHLVRPGSFFEQDLDTLPNFTSEGYGSIRRVYVYGEEDQIMSRDFQLWQINNYKPDKVYCVPSADHKIQISKVNELAQILQEVANSASDLLAVA

SEQ ID NO: 809 - DNA, 789 bp, synthetic construct
  misc_feature 1..789: note = Round 2 (Selectivity)
  source 1..789: mol_type = other DNA
atggttagtgcgcattttattctgatccacagtatttgccatggcgcctggatctggtataaactgatcccgttattacagtctgcaggtcataacgctacggcgattgatcttgtggctagcgggatcgaccctcgccaactggaacagattggcacatgggagcagtactcagaaccattgttcaccctgatcgaatcgattccggaaggtaagaaagtcattctggtaggagaatccggtggcggcatcaatattgcactggccgcggagaaatatccggagaaagtgagcgccctcgtctttcacaacgcacttatgcccgatatcgatcacagtccagcgttcgtgctgaagaaaaccagcgaagttttcactgactggaaagattcgatcttcagcaattatacctacggtaacgacacggttaccgcggtggaattgggagatcgtactctggccgagaacatcttctccaattctccgattgaagatgtagaactggcgaaacatctggtccgcaaaggctccttctttgagcaagacttggataccctgccgaactttacgtcggaagggtatggttcaattcgtcgtgtgtatgtttacggcgaagaagaccagatctttagccgcgattttcagttatggcaaattaataattataagcctgataaagtgtactgtgtaccgagtgctgaccacaagattcagatcagcaaagtcaacgagctggcccagattctccaagaagttgcaaactctgcgagtgatcttcttgcagtggct

SEQ ID NO: 810 - protein, 263 aa, synthetic construct
  REGION 1..263: note = Round 2 (Selectivity)
MVSAHFILIHSICHGAWIWYKLIPLLQSAGHNATAIDLVASGIDPRQLEQIGTWEQYSEPLFTLIESIPEGKKVILVGESGGGINIALAAEKYPEKVSALVFHNALMPDIDHSPAFVLKKTSEVFTDWKDSIFSNYTYGNDTVTAVELGDRTLAENIFSNSPIEDVELAKHLVRKGSFFEQDLDTLPNFTSEGYGSIRRVYVYGEEDQIFSRDFQLWQINNYKPDKVYCVPSADHKIQISKVNELAQILQEVANSASDLLAVA

SEQ ID NO: 811 - DNA, 789 bp, synthetic construct
  misc_feature 1..789: note = Round 2 (Selectivity)
  source 1..789: mol_type = other DNA
atggttagtgcgcattttattctgatccacagtatttgccatggcgcctggctctggtataaactgatcccgttattacagtctgcaggtcataacgctacggcgattgatcttgtggctagcgggatcgaccctcgccaactggaacagattggcacatgggagcagtactcagaaccattgttcaccctgatcgaatcgattccggaaggtaagaaagtcattctggtaggattttccggtggcggcatcaatattgcactggccgcggagaaatatccggagaaagtgagcgccctcgtctttcacaacgcacttatgcccgatatcgatcacagtccagcgttcgtgtacaagaaatttagcgaagttttcactgactggaaagattcgatcttcagcaattatacctacggtaacgacacggttaccgcggtggaattgggagatcgtactctggccgagaacatcttctccaattctccgattgaagatgtagaactggcgaaacatctggtccgcaaaggctccttctttgagcaagacttggataccctgccgaactttacgtcggaagggtatggttcaattcgtcgtgtgtatgtttacggcgaagaagaccagatctttagccgcgattttcagttatggcaaattaataattataagcctgataaagtgtactgtgtaccgagtgctgaccacaagattcagatcagcaaagtcaacgagctggcccagattctccaagaagttgcaaactctgcgagtgatcttcttgcagtggct

SEQ ID NO: 812 - protein, 263 aa, synthetic construct
  REGION 1..263: note = Round 2 (Selectivity)
MVSAHFILIHSICHGAWLWYKLIPLLQSAGHNATAIDLVASGIDPRQLEQIGTWEQYSEPLFTLIESIPEGKKVILVGFSGGGINIALAAEKYPEKVSALVFHNALMPDIDHSPAFVYKKFSEVFTDWKDSIFSNYTYGNDTVTAVELGDRTLAENIFSNSPIEDVELAKHLVRKGSFFEQDLDTLPNFTSEGYGSIRRVYVYGEEDQIFSRDFQLWQINNYKPDKVYCVPSADHKIQISKVNELAQILQEVANSASDLLAVA

SEQ ID NO: 813 - DNA, 789 bp, synthetic construct
  misc_feature 1..789: note = Round 2 (Selectivity)
  source 1..789: mol_type = other DNA
atggttagtgcgcattttattctgatccacagtatttgccatggcgcctggctctggtataaactgatcccgttattacagtctgcaggtcataacgctacggcgattgatcttgtggctagcgggatcgaccctcgccaactggaacagattggcacatgggagcagtactcagaaccattgttcaccctgatcgaatcgattccggaaggtaagaaagtcattctggtaggagaatccggtggcggcatcaatattgcactggccgcggagaaatatccggagaaagtgagcgccctcgtctttcacaacgcacttatgcccgatatcgatcacagtccagcgttcgtgtacaagaaatttagcgaagttttcactgactggaaagattcgatcttcagcaattatacctacggtaacgacacggttaccgcggtggaattgggagatcgtacttgggccgagaacatcttctccaattctccgattgaagatgtagaactggcgaaacatctggtccgcaaaggctccttctttgagcaagacttggataccctgccgaactttacgtcggaagggtatggttcaattcgtcgtgtgtatgtttacggcgaagaagaccagatctttagccgcgattttcagttatggcaaattaataattataagcctgataaagtgtactgtgtaccgagtgctgaccacaagattcagatcagcaaagtcaacgagctggcccagattctccaagaagttgcaaactctgcgagtgatcttcttgcagtggct

SEQ ID NO: 814 - protein, 263 aa, synthetic construct
  REGION 1..263: note = Round 2 (Selectivity)
MVSAHFILIHSICHGAWLWYKLIPLLQSAGHNATAIDLVASGIDPRQLEQIGTWEQYSEPLFTLIESIPEGKKVILVGESGGGINIALAAEKYPEKVSALVFHNALMPDIDHSPAFVYKKFSEVFTDWKDSIFSNYTYGNDTVTAVELGDRTWAENIFSNSPIEDVELAKHLVRKGSFFEQDLDTLPNFTSEGYGSIRRVYVYGEEDQIFSRDFQLWQINNYKPDKVYCVPSADHKIQISKVNELAQILQEVANSASDLLAVA

SEQ ID NO: 815 - DNA, 789 bp, synthetic construct
  misc_feature 1..789: note = Round 2 (Selectivity)
  source 1..789: mol_type = other DNA
atggttagtgcgcattttattctgatccacagtatttgccatggcgcctggctctggtataaactgatcccgttattacagtctgcaggtcataacgctacggcgattgatcttgtggctagcgggatcgaccctcgccaactggaacagattggcacatgggagcagtactcagaaccattgttcaccctgatcgaatcgattccggaaggtaagaaagtcattctggtaggagaatccggtggcggcatcaatattgcactggccgcggagaaatatccggagaaagtgagcgccctcgtctttcacaacgcacttatgcccgatatcgatcacagtccagcgttcgtgtacaagaaatttagcgaagttttcactgactggaaagattcgatcttcagcaattatacctacggtaacgacacggttaccgcggtggaattgggagatcgtactctggccgagaacatcttctccaattctccgattgaagatgtagaactggcgaaacatctggtccgcaaaggctccttctttgagcaagacttggataccctgccgaactttacgtcggaagggtatggttcaattcgtcgtgtgtatgtttacggcgaagaagaccagatctttagccgcgattttcagttatggcaaattaataattataagcctgataaagtgtactgtgtaccgagtgctgaccacaagattcagatcagcaaagtcaacgagctggcccagagtctccaagaagttgcaaactctgcgagtgatcttcttgcagtggct

SEQ ID NO: 816 - protein, 263 aa, synthetic construct
  REGION 1..263: note = Round 2 (Selectivity)
MVSAHFILIHSICHGAWLWYKLIPLLQSAGHNATAIDLVASGIDPRQLEQIGTWEQYSEPLFTLIESIPEGKKVILVGESGGGINIALAAEKYPEKVSALVFHNALMPDIDHSPAFVYKKFSEVFTDWKDSIFSNYTYGNDTVTAVELGDRTLAENIFSNSPIEDVELAKHLVRKGSFFEQDLDTLPNFTSEGYGSIRRVYVYGEEDQIFSRDFQLWQINNYKPDKVYCVPSADHKIQISKVNELAQSLQEVANSASDLLAVA

SEQ ID NO: 817 - DNA, 789 bp, synthetic construct
  misc_feature 1..789: note = Round 2 (Selectivity)
  source 1..789: mol_type = other DNA
atggttagtgcgcattttattctgatccacagtatttgccatggcgcctggctctggtataaactgatcccgttattacagtctgcaggtcataacgctacggcgattgatcttgtggctagcgggatcgaccctcgccaactggaacagattggcacatgggagcagtactcagaaccattgttcaccctgatcgaatcgattccggaaggtaagaaagtcattctggtaggagaatccggtggcggcatcaatattgcactggccgcggagaaatatccggagaaagtgagcgccctcgtctttcacaacgcacttatgcccgatatcgatcacagtccagcgttcgtgtacaagaaatttagcgaagttttcactgactggaaagattcgatcttcagcaattatacctacggtaacgacacggttaccgcggtggaattgggagatcgtactctggccgagaacatcttctccaattctccgattgaagatgtagaactggcgaaacatctggtccgcaaaggctccttctttgagcaagacttggataccctgccgaactttacgtcggaagggtatggttcaattcgtcgtgtgtatgtttacggcgaagaagaccagatctttagccgcgattttcagttatggcaaattaataattataagcctgataaagtgtactgtgtaccgagtcgggaccacaagattcagatcagcaaagtcaacgagctggcccagattctccaagaagttgcaaactctgcgagtgatcttcttgcagtggct

SEQ ID NO: 818 - protein, 263 aa, synthetic construct
  REGION 1..263: note = Round 2 (Selectivity)
MVSAHFILIHSICHGAWLWYKLIPLLQSAGHNATAIDLVASGIDPRQLEQIGTWEQYSEPLFTLIESIPEGKKVILVGESGGGINIALAAEKYPEKVSALVFHNALMPDIDHSPAFVYKKFSEVFTDWKDSIFSNYTYGNDTVTAVELGDRTLAENIFSNSPIEDVELAKHLVRKGSFFEQDLDTLPNFTSEGYGSIRRVYVYGEEDQIFSRDFQLWQINNYKPDKVYCVPSRDHKIQISKVNELAQILQEVANSASDLLAVA

SEQ ID NO: 819 - DNA, 789 bp, synthetic construct
  misc_feature 1..789: note = Round 2 (Selectivity)
  source 1..789: mol_type = other DNA
atggttagtgcgcattttattctgatccacagtatttgccatggcgcctggctctggtataaactgatcccgttattacagtctgcaggtcataacgctacggcgattgatcttgtggctagcgggatcgaccctcgccaactggaacagattggcacatgggagcagtactcagaaccattgttcaccctgatcgaatcgattccggaaggtaagaaagtcattctggtaggagaatccggtggcggcatcaatattgcactggccgcggagaaatatccggagaaagtgagcgccctcgtctttcacaacgcacttatgcccgatatcgatcacagtccagcgttcgtgtacaagaaatttagcgaagttttcactgactggaaagattcgatcttcagcaattatacctacggtaacgacacggttaccgcggtggaattgggagatcgtactctggccgagaacatcttctccaatatgccgattgaagatgtagaactggcgaaacatctggtccgcaaaggctccttctttgagcaagacttggataccctgccgaactttacgtcggaagggtatggttcaattcgtcgtgtgtatgtttacggcgaagaagaccagatctttagccgcgattttcagttatggcaaattaataattataagcctgataaagtgtactgtgtaccgagtgctgaccacaagattcagatcagcaaagtcaacgagctggcccagattctccaagaagttgcaaactctgcgagtgatcttcttgcagtggct

SEQ ID NO: 820 - protein, 263 aa, synthetic construct
  REGION 1..263: note = Round 2 (Selectivity)
MVSAHFILIHSICHGAWLWYKLIPLLQSAGHNATAIDLVASGIDPRQLEQIGTWEQYSEPLFTLIESIPEGKKVILVGESGGGINIALAAEKYPEKVSALVFHNALMPDIDHSPAFVYKKFSEVFTDWKDSIFSNYTYGNDTVTAVELGDRTLAENIFSNMPIEDVELAKHLVRKGSFFEQDLDTLPNFTSEGYGSIRRVYVYGEEDQIFSRDFQLWQINNYKPDKVYCVPSADHKIQISKVNELAQILQEVANSASDLLAVA

SEQ ID NO: 821 - DNA, 789 bp, synthetic construct
  misc_feature 1..789: note = Round 2 (Selectivity)
  source 1..789: mol_type = other DNA
atggttagtgcgcattttattctgatccacaatatttgccatggcgcctggctctggtataaactgatcccgttattacagtctgcaggtcataacgctacggcgattgatcttgtggctagcgggatcgaccctcgccaactggaacagattggcacatgggagcagtactcagaaccattgttcaccctgatcgaatcgattccggaaggtaagaaagtcattctggtaggagaatccggtggcggcatcaatattgcactggccgcggagaaatatccggagaaagtgagcgccctcgtctttcacaacgcacttatgcccgatatcgatcacagtccagcgttcgtgtacaagaaatttagcgaagttttcactgactggaaagattcgatcttcagcaattatacctacggtaacgacacggttaccgcggtggaattgggagatcgtactctggccgagaacatcttctccaattctccgattgaagatgtagaactggcgaaacatctggtccgcaaaggctccttctttgagcaagacttggataccctgccgaactttacgtcggaagggtatggttcaattcgtcgtgtgtatgtttacggcgaagaagaccagatctttagccgcgattttcagttatggcaaattaataattataagcctgataaagtgtactgtgtaccgagtgctgaccacaagattcagatcagcaaagtcaacgagctggcccagattctccaagaagttgcaaactctgcgagtgatcttcttgcagtggct

SEQ ID NO: 822 - protein, 263 aa, synthetic construct
  REGION 1..263: note = Round 2 (Selectivity)
MVSAHFILIHNICHGAWLWYKLIPLLQSAGHNATAIDLVASGIDPRQLEQIGTWEQYSEPLFTLIESIPEGKKVILVGESGGGINIALAAEKYPEKVSALVFHNALMPDIDHSPAFVYKKFSEVFTDWKDSIFSNYTYGNDTVTAVELGDRTLAENIFSNSPIEDVELAKHLVRKGSFFEQDLDTLPNFTSEGYGSIRRVYVYGEEDQIFSRDFQLWQINNYKPDKVYCVPSADHKIQISKVNELAQILQEVANSASDLLAVA

SEQ ID NO: 823 - DNA, 789 bp, synthetic construct
  misc_feature 1..789: note = Round 2 (Selectivity)
  source 1..789: mol_type = other DNA
atggttagtgcgcattttattctgatccacagtatttgccatggcgcctggctctggtataaactgatcccgttattacagtctgcaggtcataacgctacggcgattgatcttgtggctagcgggatcgaccctcgccaactggaacagattggcacatgggagcagtactcagaaccattgttcaccctgatcgaatcgattccggaaggtaagaaagtcattccggtaggagaatccggtggcggcatcaatattgcactggccgcggagaaatatccggagaaagtgagcgccctcgtctttcacaacgcacttatgcccgatatcgatcacagtccagcgttcgtgtacaagaaatttagcgaagttttcactgactggaaagattcgatcttcagcaattatacctacggtaacgacacggttaccgcggtggaattgggagatcgtactctggccgagaacatcttctccaattctccgattgaagatgtagaactggcgaaacatctggtccgcaaaggctccttctttgagcaagacttggataccctgccgaactttacgtcggaagggtatggttcaattcgtcgtgtgtatgtttacggcgaagaagaccagatctttagccgcgattttcagttatggcaaattaataattataagcctgataaagtgtactgtgtaccgagtgctgaccacaagattcagatcagcaaagtcaacgagctggcccagattctccaagaagttgcaaactctgcgagtgatcttcttgcagtggct

SEQ ID NO: 824 - protein, 263 aa, synthetic construct
  REGION 1..263: note = Round 2 (Selectivity)
MVSAHFILIHSICHGAWLWYKLIPLLQSAGHNATAIDLVASGIDPRQLEQIGTWEQYSEPLFTLIESIPEGKKVIPVGESGGGINIALAAEKYPEKVSALVFHNALMPDIDHSPAFVYKKFSEVFTDWKDSIFSNYTYGNDTVTAVELGDRTLAENIFSNSPIEDVELAKHLVRKGSFFEQDLDTLPNFTSEGYGSIRRVYVYGEEDQIFSRDFQLWQINNYKPDKVYCVPSADHKIQISKVNELAQILQEVANSASDLLAVA

SEQ ID NO: 825 - DNA, 789 bp, synthetic construct
  misc_feature 1..789: note = Round 2 (Selectivity)
  source 1..789: mol_type = other DNA
atggttagtgcgcattttattctgatccacagtatttgccatggcgcctggctctggtataaactgatcccgttattacagtctgcaggtcataacgctacggcgattgatcttgtggctagcgggatcgaccctcgccaactggaacagattggcacatgggagcagtactcagaaccattgttcaccctgatcgaatcgattccggaaggtaagaaagtcattctggtaggagaatccggtggcggcatcaatattgcactggccgcggagaaatatccggagaaagtgagcgccctcttgtttcacaacgcacttatgcccgatatcgatcacagtccagcgttcgtgtacaagaaatttagcgaagttttcactgactggaaagattcgatcttcagcaattatacctacggtaacgacacggttaccgcggtggaattgggagatcgtactctggccgagaacatcttctccaattctccgattgaagatgtagaactggcgaaacatctggtccgcaaaggctccttctttgagcaagacttggataccctgccgaactttacgtcggaagggtatggttcaattcgtcgtgtgtatgtttacggcgaagaagaccagatctttagccgcgattttcagttatggcaaattaataattataagcctgataaagtgtactgtgtaccgagtgctgaccacaagattcagatcagcaaagtcaacgagctggcccagattctccaagaagttgcaaactctgcgagtgatcttcttgcagtggct

SEQ ID NO: 826 - protein, 263 aa, synthetic construct
  REGION 1..263: note = Round 2 (Selectivity)
MVSAHFILIHSICHGAWLWYKLIPLLQSAGHNATAIDLVASGIDPRQLEQIGTWEQYSEPLFTLIESIPEGKKVILVGESGGGINIALAAEKYPEKVSALLFHNALMPDIDHSPAFVYKKFSEVFTDWKDSIFSNYTYGNDTVTAVELGDRTLAENIFSNSPIEDVELAKHLVRKGSFFEQDLDTLPNFTSEGYGSIRRVYVYGEEDQIFSRDFQLWQINNYKPDKVYCVPSADHKIQISKVNELAQILQEVANSASDLLAVA

SEQ ID NO: 827 - DNA, 789 bp, synthetic construct
  misc_feature 1..789: note = Round 2 (Selectivity)
  source 1..789: mol_type = other DNA
atggttagtgcgcattttgagctgatccacagtatttgccatggcgcctggctctggtataaactgatcccgttattacagtctgcaggtcataacgctacggcgattgatcttgtggctagcgggatcgaccctcgccaactggaacagattggcacatgggagcagtactcagaaccattgttcaccctgatcgaatcgattccggaaggtaagaaagtcattctggtaggagaatccggtggcggcatcaatattgcactggccgcggagaaatatccggagaaagtgagcgccctcgtctttcacaacgcacttatgcccgatatcgatcacagtccagcgttcgtgtacaagaaatttagcgaagttttcactgactggaaagattcgatcttcagcaattatacctacggtaacgacacggttaccgcggtggaattgggagatcgtactctggccgagaacatcttctccaattctccgattgaagatgtagaactggcgaaacatctggtccgcaaaggctccttctttgagcaagacttggataccctgccgaactttacgtcggaagggtatggttcaattcgtcgtgtgtatgtttacggcgaagaagaccagatctttagccgcgattttcagttatggcaaattaataattataagcctgataaagtgtactgtgtaccgagtgctgaccacaagattcagatcagcaaagtcaacgagctggcccagattctccaagaagttgcaaactctgcgagtgatcttcttgcagtggct

SEQ ID NO: 828 - protein, 263 aa, synthetic construct
  REGION 1..263: note = Round 2 (Selectivity)
MVSAHFELIHSICHGAWLWYKLIPLLQSAGHNATAIDLVASGIDPRQLEQIGTWEQYSEPLFTLIESIPEGKKVILVGESGGGINIALAAEKYPEKVSALVFHNALMPDIDHSPAFVYKKFSEVFTDWKDSIFSNYTYGNDTVTAVELGDRTLAENIFSNSPIEDVELAKHLVRKGSFFEQDLDTLPNFTSEGYGSIRRVYVYGEEDQIFSRDFQLWQINNYKPDKVYCVPSADHKIQISKVNELAQILQEVANSASDLLAVA

SEQ ID NO: 829 - DNA, 789 bp, synthetic construct
  misc_feature 1..789: note = Round 2 (Selectivity)
  source 1..789: mol_type = other DNA
atggttagtgcgcattttattctgatccacagtatttgccatggcgcctggctctggtataaactgatcccgttattacagtctgcaggtcataacgctacggcgattgatcttgtggctagcgggatcgaccctcgccaactggaacagattggcacatgggagcagtactcagaaccattgttcaccctgatcgaatcgattccggaaggtaagaaagtcattctggtaggagaatccggtggcggcatcaatattgcactggccgcggagaaatatccggagaaagtgagcgccctcgtctttcacaacgcacttatgcccgatatcgatcacagtccagcgttcgtgtacaagaaatttagcgaagttttcactgactggaaagattcgatcttcagcaattatacctacggtaacgacacggttaccgcggtggaattgggagatcgtactctggccgagaacatcttctccaattctccgattgaagatgtagaactggcgaaacatgtggtccgcaaaggctccttctttgagcaagacttggataccctgccgaactttacgtcggaagggtatggttcaattcgtcgtgtgtatgtttacggcgaagaagaccagatctttagccgcgattttcagttatggcaaattaataattataagcctgataaagtgtactgtgtaccgagtgctgaccacaagattcagatcagcaaagtcaacgagctggcccagattctccaagaagttgcaaactctgcgagtgatcttcttgcagtggct

SEQ ID NO: 830 - protein, 263 aa, synthetic construct
  REGION 1..263: note = Round 2 (Selectivity)
MVSAHFILIHSICHGAWLWYKLIPLLQSAGHNATAIDLVASGIDPRQLEQIGTWEQYSEPLFTLIESIPEGKKVILVGESGGGINIALAAEKYPEKVSALVFHNALMPDIDHSPAFVYKKFSEVFTDWKDSIFSNYTYGNDTVTAVELGDRTLAENIFSNSPIEDVELAKHVVRKGSFFEQDLDTLPNFTSEGYGSIRRVYVYGEEDQIFSRDFQLWQINNYKPDKVYCVPSADHKIQISKVNELAQILQEVANSASDLLAVA

SEQ ID NO: 831 - DNA, 789 bp, synthetic construct
  misc_feature 1..789: note = Round 2 (Selectivity)
  source 1..789: mol_type = other DNA
atggttagtgcgcattttattctgatccacagtgcctgccatggcgcctggctctggtataaactgatcccgctattacagtctgcaggtcataacgctacggcgattgatcttgtcgctagctggatcgaccctcgccaactggaacagattggcacatgggagcagtactcagaaccattgttcaccctgatcgaatcgattccggaaggtaagaaagtcattctggtaggagaatccggtggcggcatcaatattgcactggccgcggagaaatatccggagaaagtgagcgccctcgtctttcacaacgcacttatgcccgatatcgatcacagtccagcgttcgtgtacaagaaatttagcgaagttcgtactggctggaaagattcgatcttcagcaattatacctacggtaacgacacggttaccgcggtggaattgggagaccgtactctggccgagaacatcttctccaattctccgattgaagatgtagaactggcgaaacatctggtccgcaaaggctccttctttgagcaagacttggataccctgccgaactttacgtcggaagggtatggttcaattcgtcgtgtgtatgtttacggcgaagaagaccagatctttagccgcgattttcagttatggcaaattaataattataagcctgataaagtgtactgtgtaccgagtgctgaccacaagattcagatcagcaaagtcaacgagctggcccagattctccaagaagttgcaaactctgcgagtgatcttcttgcagtggct

SEQ ID NO: 832 - protein, 263 aa, synthetic construct
  REGION 1..263: note = Round 2 (Selectivity)
MVSAHFILIHSACHGAWLWYKLIPLLQSAGHNATAIDLVASWIDPRQLEQIGTWEQYSEPLFTLIESIPEGKKVILVGESGGGINIALAAEKYPEKVSALVFHNALMPDIDHSPAFVYKKFSEVRTGWKDSIFSNYTYGNDTVTAVELGDRTLAENIFSNSPIEDVELAKHLVRKGSFFEQDLDTLPNFTSEGYGSIRRVYVYGEEDQIFSRDFQLWQINNYKPDKVYCVPSADHKIQISKVNELAQILQEVANSASDLLAVA

SEQ ID NO: 833 - DNA, 789 bp, synthetic construct
  misc_feature 1..789: note = Round 2 (Selectivity)
  source 1..789: mol_type = other DNA
atggttagtgcgcattttattctgatccacagtatttgccatggcatgtggctctggtataaactgatcccgttattacagtctgcaggtcataacgctacggcgattgatcttgtggctagcgggatcgaccctcgccaactggaacagattggcacatgggagcagtactcagaaccattgttcaccctgatcgaatcgattccggaaggtaagaaagtcattctggtaggagaatccggtggcggcatcaatattgcactggccgcggagaaatatccggagaaagtgagcgccctcgtctttcacaacgcacttatgcccgatatcgatcacagtccagcgttcgtgtacaagaaatttagcgaagttttcactgactggaaagattcgatcttcagcaattatacctacggtaacgacacggttaccgcggtggaattgggagatcgtactctggccgagaacatcttctccaattctccgattgaagatgtagaactggcgaaacatctggtccgcaaaggctccttctttgagcaagacttggataccctgccgaactttacgtcggaagggtatggttcaattcgtcgtgtgtatgtttacggcgaagaagaccagatctttagccgcgattttcagttatggcaaattaataattataagcctgataaagtgtactgtgtaccgagtgctgaccacaagattcagatcagcaaagtcaacgagctggcccagattctccaagaagttgcaaactctgcgagtgatcttcttgcagtggct

SEQ ID NO: 834 - protein, 263 aa, synthetic construct
  REGION 1..263: note = Round 2 (Selectivity)
MVSAHFILIHSICHGMWLWYKLIPLLQSAGHNATAIDLVASGIDPRQLEQIGTWEQYSEPLFTLIESIPEGKKVILVGESGGGINIALAAEKYPEKVSALVFHNALMPDIDHSPAFVYKKFSEVFTDWKDSIFSNYTYGNDTVTAVELGDRTLAENIFSNSPIEDVELAKHLVRKGSFFEQDLDTLPNFTSEGYGSIRRVYVYGEEDQIFSRDFQLWQINNYKPDKVYCVPSADHKIQISKVNELAQILQEVANSASDLLAVA

SEQ ID NO: 835 - DNA, 789 bp, synthetic construct
  misc_feature 1..789: note = Round 2 (Selectivity)
  source 1..789: mol_type = other DNA
atggttagtgcgcattttattctgatccacagtatttgccatggcgcctggctctggtataaactgatcccgttattacagtctgcaggtcataacgctacggcgattgatcttgtggctagcgggatcgaccctcgccaactggaacagattggcacatgggagcagtactcagaaccattgttcaccctgatcgaatcgattccggaaggtaagaaagtcattctggtaggagaatccggtggcggcatcaatattgcactggccgcggagaaatatccggagaaagtgagcgccctcgtctttcacaacgcacttatgcccgatatcgatcacagtccagcgttcgtgtacaagaaatttagcgaagttttcactgactggaaagattcgatcttcagcaattatacctacggtaacgacacggttaccgcggtggaattgggagatcgtactctggccgagaacatcttctccaattctccgattgaagatgtagaactggcgaaacatctggtccgcaaaggctccttctttgagcaagacttggataccctgccgaactttacgtcggaagggtatggttcaattcgtcgtgtgtatgtttacggcgaagaaaatcagatctttagccgcgattttcagttatggcaaattaataattataagcctgataaagtgtactgtgtaccgagtgctgaccacaagattcagatcagcaaagtcaacgagctggcccagattctccaagaagttgcaaactctgcgagtgatcttcttgcagtggct

SEQ ID NO: 836 - protein, 263 aa, synthetic construct
  REGION 1..263: note = Round 2 (Selectivity)
MVSAHFILIHSICHGAWLWYKLIPLLQSAGHNATAIDLVASGIDPRQLEQIGTWEQYSEPLFTLIESIPEGKKVILVGESGGGINIALAAEKYPEKVSALVFHNALMPDIDHSPAFVYKKFSEVFTDWKDSIFSNYTYGNDTVTAVELGDRTLAENIFSNSPIEDVELAKHLVRKGSFFEQDLDTLPNFTSEGYGSIRRVYVYGEENQIFSRDFQLWQINNYKPDKVYCVPSADHKIQISKVNELAQILQEVANSASDLLAVA

SEQ ID NO: 837 - DNA, 789 bp, synthetic construct
  misc_feature 1..789: note = Round 2 (Selectivity)
  source 1..789: mol_type = other DNA
atggttagtgcgcattttattctgatccacagtatttgccatggcgcctggctctggtataaactgatcccgttattacagtctgcaggtcataacgctacggcgattgatcttgtggctagcgggatcgaccctcgccaactggaacagattggcacatgggagcagtactcagaaccattgttcaccctgatcgaatcgattccggaaggtaagaaagtcattctggtaggagaatccggtggcggcatcaatattgcactggccgcggagaaatatccggagaaagtgagcgccctcgtctttcacaacgcacttatgcccgatatcgatcacagtccagcgttcgtgtacaagaaatttagcgaagttttcactgactggaaagattcgatcttcagcaattatacctacggtaacgacacggttaccgcggtggaattgggagatcgtactctggccgagaacatcttctccaattctccgattgaagatgtagaactggcgaaacatctggtccgcaaaggctccttctttgagcaagacttggataccctgccgaactttacgtcggaagggtatggttcaattcgtcgtgtgtatgtttacggcgaagaagaccagatctttagccgcgattttcagttatggcaaattaataattataagcctgataaagtgtactgtgtaccgagtgctgaccacaagattcagatcagcaaagtcaacgaggatgcccagattctccaagaagttgcaaactctgcgagtgatcttcttgcagtggct

SEQ ID NO: 838 - protein, 263 aa, synthetic construct
  REGION 1..263: note = Round 2 (Selectivity)
MVSAHFILIHSICHGAWLWYKLIPLLQSAGHNATAIDLVASGIDPRQLEQIGTWEQYSEPLFTLIESIPEGKKVILVGESGGGINIALAAEKYPEKVSALVFHNALMPDIDHSPAFVYKKFSEVFTDWKDSIFSNYTYGNDTVTAVELGDRTLAENIFSNSPIEDVELAKHLVRKGSFFEQDLDTLPNFTSEGYGSIRRVYVYGEEDQIFSRDFQLWQINNYKPDKVYCVPSADHKIQISKVNEDAQILQEVANSASDLLAVA

SEQ ID NO: 839 - DNA, 789 bp, synthetic construct
  misc_feature 1..789: note = Round 2 (Selectivity)
  source 1..789: mol_type = other DNA
atggttagtgcgcattttattctgatccacagtatttgccatggcgcctggctctggtataaactgatcccgttattacagtctgcaggtcataacgctacggcgattgatcttgtggctagcgggatcgaccctcgccaactggaacagattggcacatgggagcagtactcagaaccattgttcaccctgatcgaatcgattccggaaggtaagaaagtcattctggtaggagaatccggtggcggcatcaatattgcactggccgcggagaaatatccggagaaagtgagcgccctcgtctttcacaacgcacttatgcccgatatcgatcacagtccagcgttcgtgtacaagaaatttagcgaagttttcactgactggaaagattcgatcttcagcaattatacctacggtaacgacacggttaccgcggtggaattgggagatcgtactctggccgagaacatcttctccaattctccgattgaagatgtagaactggcgaaacatctggtccgcaaaggctccttctttgagcaagacttggataccctgccgaactttacgtcggaagggtatggttcaattcgtcgtggttatgtttacggcgaagaagaccagatctttagccgcgattttcagttatggcaaattaataattataagcctgataaagtgtactgtgtaccgagtgctgaccacaagattcagatcagcaaagtcaacgagctggcccagattctccaagaagttgcaaactctgcgagtgatcttcttgcagtggct

SEQ ID NO: 840 - protein, 263 aa, synthetic construct
  REGION 1..263: note = Round 2 (Selectivity)
MVSAHFILIHSICHGAWLWYKLIPLLQSAGHNATAIDLVASGIDPRQLEQIGTWEQYSEPLFTLIESIPEGKKVILVGESGGGINIALAAEKYPEKVSALVFHNALMPDIDHSPAFVYKKFSEVFTDWKDSIFSNYTYGNDTVTAVELGDRTLAENIFSNSPIEDVELAKHLVRKGSFFEQDLDTLPNFTSEGYGSIRRGYVYGEEDQIFSRDFQLWQINNYKPDKVYCVPSADHKIQISKVNELAQILQEVANSASDLLAVA

SEQ ID NO: 841 - DNA, 789 bp, synthetic construct
  misc_feature 1..789: note = Round 2 (Selectivity)
  source 1..789: mol_type = other DNA
atggttagtgcgcattttattctgatccacagtatttgccatggcgcctggctctggtataaactgatcccgttattacagtctgcaggtcataacgctacggcgattgatcttgtggctagcgggatcgaccctcgccaactggaacagattggcacatgggagcagtactcagaaccattgttcaccctgatcgaatcgattccggaaggtaagaaagtcattctggtaggagaatccggtggcggcatcaatattgcactggccgcggagaaatatccggagaaagtgagcgccctcgtctttcacaacgcacttatgcccgatatcgatcacagtccagcgttcgtgtacaagaaatttagcgaagttttcactgactggaaagattcgatcttcagcaattatacctacggtaacgacacggttaccgcggtggaattgggagatcgtactctggccgagaacatcttctccaattctccgattgaagatgtagaactggcgaaacatctggtccgcaaaggctccttctttgagcaagacttggataccctgccgaactttacgtcggaagggtatggttcaattcgtcgtgtgtatgtttacggcgaagaagaccagatctttagccgcgattttcagttatggcaaattaataattataagcctgataaagtgtactgtgtaccgagtgctgaccacaagattcagatcagcaaagtcaacgagctggcccaggggctccaagaagttgcaaactctgcgagtgatcttcttgcagtggct

SEQ ID NO: 842 - protein, 263 aa, synthetic construct
  REGION 1..263: note = Round 2 (Selectivity)
MVSAHFILIHSICHGAWLWYKLIPLLQSAGHNATAIDLVASGIDPRQLEQIGTWEQYSEPLFTLIESIPEGKKVILVGESGGGINIALAAEKYPEKVSALVFHNALMPDIDHSPAFVYKKFSEVFTDWKDSIFSNYTYGNDTVTAVELGDRTLAENIFSNSPIEDVELAKHLVRKGSFFEQDLDTLPNFTSEGYGSIRRVYVYGEEDQIFSRDFQLWQINNYKPDKVYCVPSADHKIQISKVNELAQGLQEVANSASDLLAVA

SEQ ID NO: 843 - DNA, 789 bp, synthetic construct
  misc_feature 1..789: note = Round 3 (Activity)
  source 1..789: mol_type = other DNA
atggttagtgcgcattttattctgatccacagtatttgccatggcgcctggctgtggtataaactgatcccgttattacagtctgcaggtcataacgttacggcgattgatctttgggctagcgggatcaaccctcgccaactggaacagattggcacatgggagcagtactcagaaccattgttcaccctgatcgaatcgattccggaaggtaagaaagtcattctggtaggagaatccggtggcggcatcaatattgcactggccgcggagaaatatccggagaaagtgagcgccctcgtctttcacaacgcacttatgcccgatatcgatcacagtccagcgttcgtgtataagaaatatagcgaagttttcactgactggaaagattcgatcttcagcaattatacctacggtaacgacacggttaccgcggtggaattgggagatcgtactctggccgagaacatcttctccaattctccgattgaagatgtagaactggcgaaacatctggtccgcaaaggctccttctttgagcaagacttggataccctgccgaactttacgtcggaagggtatggttcaattcgtcgtgtgtatgtttacggcgaagaagaccagatctttagccgcgattttcagttatggcaaattaataattataagcctgataaagtgtactgtgtaccgagtgctgaccacaagattatgatcagcaaggtcaacgagctggcccagattctccaagaagttgcaaactctgcgagtgatcttcttgcagtggct

SEQ ID NO: 844 - protein, 263 aa, synthetic construct
  REGION 1..263: note = Round 3 (Activity)
MVSAHFILIHSICHGAWLWYKLIPLLQSAGHNVTAIDLWASGINPRQLEQIGTWEQYSEPLFTLIESIPEGKKVILVGESGGGINIALAAEKYPEKVSALVFHNALMPDIDHSPAFVYKKYSEVFTDWKDSIFSNYTYGNDTVTAVELGDRTLAENIFSNSPIEDVELAKHLVRKGSFFEQDLDTLPNFTSEGYGSIRRVYVYGEEDQIFSRDFQLWQINNYKPDKVYCVPSADHKIMISKVNELAQILQEVANSASDLLAVA

SEQ ID NO: 845 - DNA, 789 bp, synthetic construct
  misc_feature 1..789: note = Round 3 (Selectivity)
  source 1..789: mol_type = other DNA
atggttagtgcgcattttattctgatccacagtatttgccatggcgcctggctgtggtataaactgatcccgttattacagtctgcaggtcataacgttacggcgattgatctttgggctagcgggattaatcctcgccaactggaacagattggcacatgggagcagtactcagaaccattgttcaccctgatcgaatcgattccggaaggtaagaaagtcattctggtaggagaatccggtggcggcatcaatattgcactggccgcggagaaatatccggagaaagtgagcgccctcgtctttagtaacgcacttatgcccgatatcgatcacagtccagcgttcgtgtataagaaatatagcgaagttttcactgactggaaagattcgatcttcagcaattatacctacggtaacgacacggttaccgcggtggaattgggagatcgtactctggccgagaacatcttccaaaattctccgattgaagatgtagaactggcgaaacatctggtccgcaaaggctccttctttgagcaagacttggataccctgccgaactttacgtcggaagggtatggttcaattcgtcgtgtgtatgtttacggcgaagaagaccagatctttagccgcgattttcagttatggcaaattaataattataagcctgataaagtgtactgtgtaccgagtgctgaccacaagattatgatcagcaaggtcaacgagctggcccagattctccaagaagttgcaaactctgcgagtgatcttcttgcagtggct

SEQ ID NO: 846 - protein, 263 aa, synthetic construct
  REGION 1..263: note = Round 3 (Selectivity)
MVSAHFILIHSICHGAWLWYKLIPLLQSAGHNVTAIDLWASGINPRQLEQIGTWEQYSEPLFTLIESIPEGKKVILVGESGGGINIALAAEKYPEKVSALVFSNALMPDIDHSPAFVYKKYSEVFTDWKDSIFSNYTYGNDTVTAVELGDRTLAENIFQNSPIEDVELAKHLVRKGSFFEQDLDTLPNFTSEGYGSIRRVYVYGEEDQIFSRDFQLWQINNYKPDKVYCVPSADHKIMISKVNELAQILQEVANSASDLLAVA

SEQ ID NO: 847 - DNA, 789 bp, synthetic construct
  misc_feature 1..789: note = Round 3 (Selectivity)
  source 1..789: mol_type = other DNA
atggttagtgcgcattttattctgatccacagtatttgccatggcgcctggctgtggtataaactgatcccgttattacagtctgcaggtcataacgttacggcgattgatctttgggctagcgggattaatcctcgccaactggaacagattggcacatgggagcagtactcagaaccattgttcaccctgatcgaatcgattccggaaggtaagaaagtcattctggtaggagaatccggtggcggcatcaatattgcactggccgcggagaaatatccggagaaagtgagcgccctcgtctttagtaacgcacttatgcccgatatcgatcacagtccagcgttcgtgtataagaaatatagcgaagttttcactgactggaaagattcgatcttcagcaattatacctacggtaacgacacggttaccgcggtggaattgggagatcgtactctggccgagaacatcttctccaattctccgattgaagatgtagaactggcgaaacatctggtccgcaaaggctccttctttgagcaagacttggataccctgccgaactttacgtcggaagggtatggttcaattcgtcgtgtgtatgtttacggcgaagaagaccagatctttagccgcgattttcagttatggcaaattaataattataagcctgataaagtgtactgtgtaccgagtgctgaccacaagattatgatcagcaaggtcaacgagctggcccagattctccaagaagttgcaaactctgcgagtgatcttcttgcagtggct

SEQ ID NO: 848 - protein, 263 aa, synthetic construct
  REGION 1..263: note = Round 3 (Selectivity)
MVSAHFILIHSICHGAWLWYKLIPLLQSAGHNVTAIDLWASGINPRQLEQIGTWEQYSEPLFTLIESIPEGKKVILVGESGGGINIALAAEKYPEKVSALVFSNALMPDIDHSPAFVYKKYSEVFTDWKDSIFSNYTYGNDTVTAVELGDRTLAENIFSNSPIEDVELAKHLVRKGSFFEQDLDTLPNFTSEGYGSIRRVYVYGEEDQIFSRDFQLWQINNYKPDKVYCVPSADHKIMISKVNELAQILQEVANSASDLLAVA

SEQ ID NO: 849 - DNA, 789 bp, synthetic construct
  misc_feature 1..789: note = Round 3 (Activity)
  source 1..789: mol_type = other DNA
atggttagtgcgcattttattctgatccacagtatttgccatggcgcctggctgtggtataaactgatcccgttattacagtctgcaggtcataacgttacggcgattgatctttgggctagcgggatcaaccctcgccaactggaacagattggcacatgggagcagtactcagaaccattgttcaccctgatcgaatcgattccggaaggtaagaaagtcattctggtaggagaatccggtggcggcatcaatattgcactggccgcggagaaatatccggagaaagtgagcgccctcgtctttagtaacgcacttatgcccgatatcgatcacagtccagcgttcgtgtataagaaatatagcgaagttttcactgactggaaagattcgatcttcagcaattatacctacggtaacgacacggttaccgcggtggaattgggagatcgtactctggccgagaacatcttctccaattctccgattgaagatgtagaactggcgaaacatctggtccgcaaaggctccttctttgagcaagacttggataccctgccgaactttacgtcggaagggctgggttcaattcgtcgtgtgtatgtttacggcgaagaagaccagatctttagccgcgattttcagttatggcaaattaataattataagcctgataaagtgtactgtgtaccgagtgctgaccacaagattatgatcagcaaggtcaacgagctggcccagattctccaagaagttgcaaactctgcgagtgatcttcttgcagtggct

SEQ ID NO: 850 - protein, 263 aa, synthetic construct
  REGION 1..263: note = Round 3 (Activity)
MVSAHFILIHSICHGAWLWYKLIPLLQSAGHNVTAIDLWASGINPRQLEQIGTWEQYSEPLFTLIESIPEGKKVILVGESGGGINIALAAEKYPEKVSALVFSNALMPDIDHSPAFVYKKYSEVFTDWKDSIFSNYTYGNDTVTAVELGDRTLAENIFSNSPIEDVELAKHLVRKGSFFEQDLDTLPNFTSEGLGSIRRVYVYGEEDQIFSRDFQLWQINNYKPDKVYCVPSADHKIMISKVNELAQILQEVANSASDLLAVA

SEQ ID NO: 851 - DNA, 789 bp, synthetic construct
  misc_feature 1..789: note = Round 3 (Selectivity)
  source 1..789: mol_type = other DNA
atggttagtgcgcattttattctgatccacagtatttgccatggcgcctggctgtggtataaactgatcccgttattacagtctgcaggtcataacgttacggcgattgatctttgggctagcgggcaaaatcctcgccaactggaacagattggcacatgggagcagtactcagaaccattgttcaccctgatcgaatcgattccggaaggtaagaaagtcattctggtaggagaatccggtggcggcatcaatattgcactggccgcggagaaatatccggagaaagtgagcgccctcgtctttcataacgcacttatgcccgatatcgatcacagtccagcgttcgtgtataagaaatacagcgaagttttcactgactggaaagattcgatcttcagcaattatacctacggtaacgacacggttaccgcggtggaattgggagatcgtactctggccgagaacatcttctccaattctccgattgaagatgtagaactggcgaaacatctggtccgcaaaggctccttctttgagcaagacttggataccctgccgaactttacgtcggaagggtatggttcaattcgtcgtgtgtatgtttacggcgaagaagaccagatctttagccgcgattttcagttatggcaaattaataattataagcctgataaagtgtactgtgtaccgagtgctgaccacaagattatgatcagcaaggtcaacgagctggcccagattctccaagaagttgcaaactctgcgagtgatcttcttgcagtggct

SEQ ID NO: 852 - protein, 263 aa, synthetic construct
  REGION 1..263: note = Round 3 (Selectivity)
MVSAHFILIHSICHGAWLWYKLIPLLQSAGHNVTAIDLWASGQNPRQLEQIGTWEQYSEPLFTLIESIPEGKKVILVGESGGGINIALAAEKYPEKVSALVFHNALMPDIDHSPAFVYKKYSEVFTDWKDSIFSNYTYGNDTVTAVELGDRTLAENIFSNSPIEDVELAKHLVRKGSFFEQDLDTLPNFTSEGYGSIRRVYVYGEEDQIFSRDFQLWQINNYKPDKVYCVPSADHKIMISKVNELAQILQEVANSASDLLAVA

SEQ ID NO: 853 - DNA, 789 bp, synthetic construct
  misc_feature 1..789: note = Round 3 (Selectivity)
  source 1..789: mol_type = other DNA
atggttagtgcgcattttattctgatccacagtatttgccatggcgcctggctgtggtataaactgatcccgttattacagtctgcaggtcataacgttacggcgattgatctttgggctagcgggattaatcctcgccaactggaacagattggcacatgggagcagtactcagaaccattgttcaccctgatcgaatcgattccggaaggtaagaaagtcattctggtaggagaatccggtggcggcatcaatattgcactggccgcggagaaatatccggagaaagtgagcgccctcgtctttagtaacgcacttatgcccgatatcgatcacagtccagcgttcgtgtataagaaatatagcgaagttttcactgactggaaagattcgatcttcagcaattatacctacggtaacgacacggttaccgcggtggaattgggagatcgtactctggccgagaacatcttctccaattctccgattgaagatgtagaactggcgaaacatctggtccgcaaaggctccttctttgagcaagacttggataccctgccgaactttacgtcggaagggtatggttcaattcgtcgtgtgtatgtttacggcgaagaagaccagatctttagccgcgattttcagttatggcaaattaataattataagcctgataaagtgtactgtgtaccgagtgctgaccacaagattcagatcagcaaagtcaacgagctggcccagattctccaagaagttgcaaactctgcgagtgatcttcttgcagtggct

SEQ ID NO: 854 - protein, 263 aa, synthetic construct
  REGION 1..263: note = Round 3 (Selectivity)
MVSAHFILIHSICHGAWLWYKLIPLLQSAGHNVTAIDLWASGINPRQLEQIGTWEQYSEPLFTLIESIPEGKKVILVGESGGGINIALAAEKYPEKVSALVFSNALMPDIDHSPAFVYKKYSEVFTDWKDSIFSNYTYGNDTVTAVELGDRTLAENIFSNSPIEDVELAKHLVRKGSFFEQDLDTLPNFTSEGYGSIRRVYVYGEEDQIFSRDFQLWQINNYKPDKVYCVPSADHKIQISKVNELAQILQEVANSASDLLAVA

SEQ ID NO: 855 - DNA, 789 bp, synthetic construct
  misc_feature 1..789: note = Round 3 (Selectivity)
  source 1..789: mol_type = other DNA
atggttagtgcgcattttattctgatccacagtatttgccatggcgcctggctgtggtataaactgatcccgttattacagtctgcaggtcataacgttacggcgattgatctttgggctagcgggagtaatcctcgccaactggaacagattggcacatgggagcagtactcagaaccattgttcaccctgatcgaatcgattccggaaggtaagaaagtcattctggtaggagaatccggtggcggcatcaatattgcactggccgcggagaaatatccggagaaagtgagcgccctcgtctttcataacgcacttatgcccgatatcgatcacagtccagcgttcgtgtataagaaatatagcgaagttttcactgactggaaagattcgatcttcagcaattatacctacggtaacgacacggttaccgcggtggaattgggagatcgtactctggccgagaacatcttctccaattctccgattgaagatgtagaactggcgaaacatctggtccgcaaaggctccttctttgagcaagacttggataccctgccgaactttacgtcggaagggtatggttcaattcgtcgtgtgtatgtttacggcgaagaagaccagatctttagccgcgattttcagttatggcaaattaataattataagcctgataaagtgtactgtgtaccgagtgctgaccacaagattatgatcagcaaggtcaacgagctggcccagattctccaagaagttgcaaactctgcgagtgatcttcttgcagtggct

SEQ ID NO: 856 - protein, 263 aa, synthetic construct
  REGION 1..263: note = Round 3 (Selectivity)
MVSAHFILIHSICHGAWLWYKLIPLLQSAGHNVTAIDLWASGSNPRQLEQIGTWEQYSEPLFTLIESIPEGKKVILVGESGGGINIALAAEKYPEKVSALVFHNALMPDIDHSPAFVYKKYSEVFTDWKDSIFSNYTYGNDTVTAVELGDRTLAENIFSNSPIEDVELAKHLVRKGSFFEQDLDTLPNFTSEGYGSIRRVYVYGEEDQIFSRDFQLWQINNYKPDKVYCVPSADHKIMISKVNELAQILQEVANSASDLLAVA

SEQ ID NO: 857 - DNA, 789 bp, synthetic construct
  misc_feature 1..789: note = Round 3 (Activity)
  source 1..789: mol_type = other DNA
atggttagtgcgcattttattctgatccacagtatttgccatggcgcctggctgtggtataaactgatcccgttattacagtctgcaggtcataacgttacggcgattgatctttgggctagcgggatcaaccctcgccaactggaacagattggcacatgggagcagtactcagaaccattgttcaccctgatcgaatcgattccggaaggtaagaaagtcattctggtaggagaatccggtggcggcatcaatattgcactggccgcggagaaatatccggagaaagtgagcgccctcgtctttcacaacgcacttatgcccgatatcgatcacagtccagcgttcgtgtataagaaatatagcgaagttttcactgactggaaagattcgatcttcagcaattatacctacggtaacgacacggttaccgcggtggaattgggagatcgtactctggccgagaacatcttctccaattctccgattgaagatgtagaactggcgaaacatctggtccgcaaaggctccttctttgagcaagacttggataccctgccgaactttacgtcggaagggtatggttcaattcgtcgtgtgtatgtttacggcgaagaagaccagatctttagccgcgattttcagttatggcaaattaataattataagcctgataaagtgtactgtgtaccgagtgctgaccacaagattatgatcagccgtgtcaacgagctggcccagattctccaagaagttgcaaactctgcgagtgatcttcttgcagtggct

SEQ ID NO: 858 - protein, 263 aa, synthetic construct
  REGION 1..263: note = Round 3 (Activity)
MVSAHFILIHSICHGAWLWYKLIPLLQSAGHNVTAIDLWASGINPRQLEQIGTWEQYSEPLFTLIESIPEGKKVILVGESGGGINIALAAEKYPEKVSALVFHNALMPDIDHSPAFVYKKYSEVFTDWKDSIFSNYTYGNDTVTAVELGDRTLAENIFSNSPIEDVELAKHLVRKGSFFEQDLDTLPNFTSEGYGSIRRVYVYGEEDQIFSRDFQLWQINNYKPDKVYCVPSADHKIMISRVNELAQILQEVANSASDLLAVA

SEQ ID NO: 859 - DNA, 789 bp, synthetic construct
  misc_feature 1..789: note = Round 4 (Selectivity)
  source 1..789: mol_type = other DNA
atggttagtgcgcattttattctgatccacagtatttgccatggcgcctggctgtggtataaactgatcccgttattacagtctgcaggtcataacgttacggcgattgatctttgggctagcgggagtaatcctcgccaactggaacagattggcacatgggagcagtactcagaaccattgttcaccctgatcgaatcgattccggaaggtaagaaagtcattctggtaggagaatccggtggcggcatcaatattgcactggccgcggagaaatatccggagaaagtgagcgccctcgtctttagtaacgcacttatgcccgatatcgatcacagtccagcgttcgtgtataagaaatatagcgaagttttcactgactggaaagattcgatcttcagcaattatacctacggtaacgacacggttaccgcggtggaattgggagatcgtactctggccgagaacatcttctccaattctccgattgaagatgtagaactggcgaaacatcgtgtccgcaaaggctccttctttgagcaagacttggataccctgccgaactttacgtcggaagggtatggttcaattcgtcgtgtgtatgtttacggcgaagaagaccagatctttagccgcgattttcagttatggcaaattaataattataagcctgataaagtgtactgtgtaccgagtgctgaccacaagattatgatcagcaaggtcaacgagctggcccagattctccaagaagttgcaaactctgcgagtgatcttcttgcagtggct

SEQ ID NO: 860 - protein, 263 aa, synthetic construct
  REGION 1..263: note = Round 4 (Selectivity)
MVSAHFILIHSICHGAWLWYKLIPLLQSAGHNVTAIDLWASGSNPRQLEQIGTWEQYSEPLFTLIESIPEGKKVILVGESGGGINIALAAEKYPEKVSALVFSNALMPDIDHSPAFVYKKYSEVFTDWKDSIFSNYTYGNDTVTAVELGDRTLAENIFSNSPIEDVELAKHRVRKGSFFEQDLDTLPNFTSEGYGSIRRVYVYGEEDQIFSRDFQLWQINNYKPDKVYCVPSADHKIMISKVNELAQILQEVANSASDLLAVA

SEQ ID NO: 861 - DNA, 789 bp, synthetic construct
  misc_feature 1..789: note = Round 3 (Selectivity)
  source 1..789: mol_type = other DNA
atggttagtgcgcattttattctgatccacagtatttgccatggcgcctggctgtggtataaactgatcccgttattacagtctgcaggtcataacgttacggcgattgatctttgggctagcgggcaaaatcctcgccaactggaacagattggcacatgggagcagtactcagaaccattgttcaccctgatcgaatcgattccggaaggtaagaaagtcattctggtaggagaatccggtggcggcatcaatattgcactggccgcggagaaatatccggagaaagtgagcgccctcgtctttagtaacgcacttatgcccgatatcgatcacagtccagcgttcgtgtataagaaatatagcgaagttttcactgactggaaagattcgatcttcagcaattatacctacggtaacgacacggttaccgcggtggaattgggagatcgtactctggccgagaacatcttctcgaattctccgattgaagatgtagaactggcgaaacatctggtccgcaaaggctccttctttgagcaagacttggataccctgccgaactttacgtcggaagggtatggttcaattcgtcgtgtgtatgtttacggcgaagaagaccagatctttagccgcgattttcagttatggcaaattaataattataagcctgataaagtgtactgtgtaccgagtgctgaccacaagattatgatcagccgtgtcaacgagctggcccagattctccaagaagttgcaaactctgcgagtgatcttcttgcagtggct

SEQ ID NO: 862 - protein, 263 aa, synthetic construct
  REGION 1..263: note = Round 3 (Selectivity)
MVSAHFILIHSICHGAWLWYKLIPLLQSAGHNVTAIDLWASGQNPRQLEQIGTWEQYSEPLFTLIESIPEGKKVILVGESGGGINIALAAEKYPEKVSALVFSNALMPDIDHSPAFVYKKYSEVFTDWKDSIFSNYTYGNDTVTAVELGDRTLAENIFSNSPIEDVELAKHLVRKGSFFEQDLDTLPNFTSEGYGSIRRVYVYGEEDQIFSRDFQLWQINNYKPDKVYCVPSADHKIMISRVNELAQILQEVANSASDLLAVA

SEQ ID NO: 863 - DNA, 789 bp, synthetic construct
  misc_feature 1..789: note = Round 3 (Selectivity)
  source 1..789: mol_type = other DNA
atggttagtgcgcattttattctgatccacagtatttgccatggcgcctggctgtggtataaactgatcccgttattacagtctgcaggtcataacgttacggcgattgatctttgggctagcggggaaaatcctcgccaactggaacagattggcacatgggagcagtactcagaaccattgttcaccctgatcgaatcgattccggaaggtaagaaagtcattctggtaggagaatccggtggcggcatcaatattgcactggccgcggagaaatatccggagaaagtgagcgccctcgtctttagtaacgcacttatgcccgatatcgatcacagtccagcgttcgtgtataagaaatatagcgaagttttcactgactggaaagattcgatcttcagcaattatacctacggtaacgacacggttaccgcggtggaattgggagatcgtactctggccgagaacatcttctccaattctccgattgaagatgtagaactggcgaaacatctggtccgcaaaggctccttctttgagcaagacttggataccctgccgaactttacgtcggaagggtatggttcaattcgtcgtgtgtatgtttacggcgaagaagaccagatctttagccgcgattttcagttatggcaaattaataattataagcctgataaagtgtactgtgtaccgagtgctgaccacaagattatgatcagccgtgtcaacgagctggcccagattctccaagaagttgcaaactctgcgagtgatcttcttgcagtggct

SEQ ID NO: 864 - protein, 263 aa, synthetic construct
  REGION 1..263: note = Round 3 (Selectivity)
MVSAHFILIHSICHGAWLWYKLIPLLQSAGHNVTAIDLWASGENPRQLEQIGTWEQYSEPLFTLIESIPEGKKVILVGESGGGINIALAAEKYPEKVSALVFSNALMPDIDHSPAFVYKKYSEVFTDWKDSIFSNYTYGNDTVTAVELGDRTLAENIFSNSPIEDVELAKHLVRKGSFFEQDLDTLPNFTSEGYGSIRRVYVYGEEDQIFSRDFQLWQINNYKPDKVYCVPSADHKIMISRVNELAQILQEVANSASDLLAVA

SEQ ID NO: 865 - DNA, 789 bp, synthetic construct
  misc_feature 1..789: note = Round 3 (Activity)
  source 1..789: mol_type = other DNA
atggttagtgcgcattttattctgatccacagtatttgccatggcgcctggctgtggtataaactgatcccgttattacagtctgcaggtcataacgttacggcgattgatctttgggctagcgggatcaaccctcgccaactggaacagattggcacatgggagcagtactcagaaccattgttcaccctgatcgaatcgattccggaaggtaagaaagtcattctggtaggagaatccggtggcggcatcaatattgcactggccgcggagaaatatccggagaaagtgagcgccctcgtctttcacaacgcacttatgcccgatatcgatcacagtccagcgttcgtgtataagaaatatagcgaagttttcactgactggaaagattcgatcttcagcaattatacctacggtaacgacacggttaccgcggtggaattgggagatcgtactctggccgagaacatcttctccaattctccgattgaagatgtagaactggcgaaacatctggtccgcaaaggctccttctttgagcaagacttggataccctgccgaactttacgtcggaagggtatggttcaattcgtcgtgtgtatgtttacggcgaagaagaccagatctttagccgcgattttcagttatggcaaattaataattataagcctgataaagtgtactgtgtaccgggtgctgaccacaagattcagatcagcaaagtcaacgagctggcccagattctccaagaagttgcaaactctgcgagtgatcttcttgcagtggct

SEQ ID NO: 866 - protein, 263 aa, synthetic construct
  REGION 1..263: note = Round 3 (Activity)
MVSAHFILIHSICHGAWLWYKLIPLLQSAGHNVTAIDLWASGINPRQLEQIGTWEQYSEPLFTLIESIPEGKKVILVGESGGGINIALAAEKYPEKVSALVFHNALMPDIDHSPAFVYKKYSEVFTDWKDSIFSNYTYGNDTVTAVELGDRTLAENIFSNSPIEDVELAKHLVRKGSFFEQDLDTLPNFTSEGYGSIRRVYVYGEEDQIFSRDFQLWQINNYKPDKVYCVPGADHKIQISKVNELAQILQEVANSASDLLAVA

SEQ ID NO: 867 - DNA, 789 bp, synthetic construct
  misc_feature 1..789: note = Round 3 (Activity)
  source 1..789: mol_type = other DNA
atggttagtgcgcattttattctgatccacagtatttgccatggcgcctggctgtggtataaactgatcccgttattacagtctgcaggtcataacgttacggcgattgatctttgggctagcgggatcaaccctcgccaactggaacagattggcacatgggagcagtactcagaaccattgttcaccctgatcgaatcgattccggaaggtaagaaagtcattctggtaggagaatccggtggcggcatcaatattgcactggccgcggagaaatatccggagaaagtgagcgccctcgtctttgtgaacgcacttatgcccgatatcgatcacagtccagcgttcgtgtataagaaatatagcgaagttttcactgactggaaagattcgatcttcagcaattatacctacggtaacgacacggttaccgcggtggaattgggagatcgtactctggccgagaacatcttctccaattctccgattgaagatgtagaactggcgaaacatctggtccgcaaaggctccttctttgagcaagacttggataccctgccgaactttacgtcggaagggtatggttcaattcgtcgtgtgtatgtttacggcgaagaagaccagatctttagccgcgattttcagttatggcaaattaataattataagcctgataaagtgtactgtgtaccgagtgctgaccacaagattcagatcagcaaagtcaacgagctggcccagattctccaagaagttgcaaactctgcgagtgatcttcttgcagtggct

SEQ ID NO: 868 - protein, 263 aa, synthetic construct
  REGION 1..263: note = Round 3 (Activity)
MVSAHFILIHSICHGAWLWYKLIPLLQSAGHNVTAIDLWASGINPRQLEQIGTWEQYSEPLFTLIESIPEGKKVILVGESGGGINIALAAEKYPEKVSALVFVNALMPDIDHSPAFVYKKYSEVFTDWKDSIFSNYTYGNDTVTAVELGDRTLAENIFSNSPIEDVELAKHLVRKGSFFEQDLDTLPNFTSEGYGSIRRVYVYGEEDQIFSRDFQLWQINNYKPDKVYCVPSADHKIQISKVNELAQILQEVANSASDLLAVA

SEQ ID NO: 869 - DNA, 789 bp, synthetic construct
  misc_feature 1..789: note = Round 3 (Activity)
  source 1..789: mol_type = other DNA
atggttagtgcgcattttattctgatccacagtatttgccatggcgcctggctgtggtataaactgatcccgttattacagtctgcaggtcataacgttacggcgattgatctttgggctagcgggatcaaccctcgccaactggaacagattggcacatgggagcagtactcagaaccattgttcaccctgatcgaatcgattccggaaggtaagaaagtcattctggtaggagaatcctttggcggcatcaatattgcactggccgcggagaaatatccggagaaagtgagcgccctcgtctttcataacgcacttatgcccgatatcgatcacagtccagcgttcgtgtataagaaatatagcgaagttttcactgactggaaagattcgatcttcagcaattatacctacggtaacgacacggttaccgcggtggaattgggagatcgtactctggccgagaacatcttctccaattctccgattgaagatgtagaactggcgaaacatctggtccgcaaaggctccttctttgagcaagacttggataccctgccgaactttacgtcggaagggtatggttcaattcgtcgtgtgtatgtttacggcgaagaagaccagatctttagccgcgattttcagttatggcaaattaataattataagcctgataaagtgtactgtgtaccgggtgctgaccacaagattcagatcagcaaagtcaacgagctggcccagattctccaagaagttgcaaactctgcgagtgatcttcttgcagtggct

SEQ ID NO: 870 - protein, 263 aa, synthetic construct
  REGION 1..263: note = Round 3 (Activity)
MVSAHFILIHSICHGAWLWYKLIPLLQSAGHNVTAIDLWASGINPRQLEQIGTWEQYSEPLFTLIESIPEGKKVILVGESFGGINIALAAEKYPEKVSALVFHNALMPDIDHSPAFVYKKYSEVFTDWKDSIFSNYTYGNDTVTAVELGDRTLAENIFSNSPIEDVELAKHLVRKGSFFEQDLDTLPNFTSEGYGSIRRVYVYGEEDQIFSRDFQLWQINNYKPDKVYCVPGADHKIQISKVNELAQILQEVANSASDLLAVA

SEQ ID NO: 871 - DNA, 789 bp, synthetic construct
  misc_feature 1..789: note = Round 3 (Selectivity)
  source 1..789: mol_type = other DNA
atggttagtgcgcattttattctgatccacagtatttgccatggcgcctggctgtggtacaaactgatcccgttattacagtctgcaggtcataacgttacggcgattgatctttgggctagcgggatgaaccctcgccagctggaacagattggcacatgggagcagtactcagaaccattgttcaccctgatcgaatcgattccggaaggtaagaaagtcattctggtaggagaatccggtggcggcatcaatattgcactggccgcggagaaatatccggagaaagtgagcgccctcgtctttctgaacgcacttatgcccgatatcgatcacagtccagcgttcgtgtataagaaatatagcgaagttttcactgactggaaagattcgatcttcagcaattatacctacggtaacgacacggttaccgcggtggaattgggagatcgtactctggccgagaacatcttctccaattctccgattgaagatgtagaactggcgaaacatctggtccgcaaaggctccttctttgagcaagacttggataccctgccgaactttacgtcggaagggtatggttcaattcgtcgtgtgtatgtttacggcgaagaagaccagatctttagccgcgattttcagttatggcaaattaataattataagcctgataaagtgtactgtgtaccgagtgctgaccacaagattcagatcagcaaagtcaacgagctggcccagattctccaagaagttgcaaactctgcgagtgatcttcttgcagtggct

SEQ ID NO: 872 - protein, 263 aa, synthetic construct
  REGION 1..263: note = Round 3 (Selectivity)
MVSAHFILIHSICHGAWLWYKLIPLLQSAGHNVTAIDLWASGMNPRQLEQIGTWEQYSEPLFTLIESIPEGKKVILVGESGGGINIALAAEKYPEKVSALVFLNALMPDIDHSPAFVYKKYSEVFTDWKDSIFSNYTYGNDTVTAVELGDRTLAENIFSNSPIEDVELAKHLVRKGSFFEQDLDTLPNFTSEGYGSIRRVYVYGEEDQIFSRDFQLWQINNYKPDKVYCVPSADHKIQISKVNELAQILQEVANSASDLLAVA

SEQ ID NO: 873 - DNA, 789 bp, synthetic construct
  misc_feature 1..789: note = Round 3 (Activity)
  source 1..789: mol_type = other DNA
atggttagtgcgcattttattctgatccacagtatttgccatggcgcctggctgtggtataaactgatcccgttattacagtctgcaggtcataacgttacggcgattgatctttgggctagcgggatcaaccctcgccagctggaacagattggcacatgggagcagtactcagaaccattgttcaccctgatcgaatcgattccggaaggtaagaaagtcattctggtaggagaatccgggggcggcatcaatattgcactggccgcggagaaatatccggagaaagtgagcgccctcgtctttctgaacgcacttatgcccgatatcgatcacagtccagcgttcgtgtataagaaatatagcgaagttttcactgactggaaagattcgatcttcagcaattatacctacggtaacgacacggttaccgcggtggaattgggagatcgtactctggccgagaacatcttctccaattctccgattgaagatgtagaactggcgaaacatctggtccgcaaaggctccttctttgagcaagacttggataccctgccgaactttacgtcggaagggtatggttcaattcgtcgtgtgtatgtttacggcgaagaagaccagatctttagccgcgattttcagttatggcaaattaataattataagcctgataaagtgtactgtgtaccgagtgctgaccacaagattcagatcagcaaagtcaacgagctggcccagattctccaagaagttgcaaactctgcgagtgatcttcttgcagtggct

SEQ ID NO: 874 - protein, 263 aa, synthetic construct
  REGION 1..263: note = Round 3 (Activity)
MVSAHFILIHSICHGAWLWYKLIPLLQSAGHNVTAIDLWASGINPRQLEQIGTWEQYSEPLFTLIESIPEGKKVILVGESGGGINIALAAEKYPEKVSALVFLNALMPDIDHSPAFVYKKYSEVFTDWKDSIFSNYTYGNDTVTAVELGDRTLAENIFSNSPIEDVELAKHLVRKGSFFEQDLDTLPNFTSEGYGSIRRVYVYGEEDQIFSRDFQLWQINNYKPDKVYCVPSADHKIQISKVNELAQILQEVANSASDLLAVA

SEQ ID NO: 875 - DNA, 789 bp, synthetic construct
  misc_feature 1..789: note = Round 3 (Activity)
  source 1..789: mol_type = other DNA
atggttagtgcgcattttattctgatccacagtatttgccatggcgcctggctgtggtataaactgatcccgttattacagtctgcaggtcataacgttacggcgattgatctttgggctagcgggatcaaccctcgccaactggaacagattggcacatgggagcagtactcagaaccattgttcaccctgatcgaatcgattccggaaggtaagaaagtcattctggtaggagaatccggtggcggcatcaatattgcactggccgcggagaaatatccggagaaagtgagcgccctcgtctttcacaacgcacttatgcccgatatcgatcacagtccagcgttcgtgtataagaaatatcgggaagttttcactgactggaaagattcgatcttcagcaattatacctacggtaacgacacggttaccgcggtggaattgggagatcgtactctggccgagaacatcttctccaattctccgattgaagatgtagaactggcgaaacatctggtccgcaaaggctccttctttgagcaagacttggataccctgccgaactttacgtcggaagggtatggttcaattcgtcgtgtgtatgtttacggcgaagaagaccagatctttagccgcgattttcagttatggcaaattaataattataagcctgataaagtgtactgtgtaccgagtgctgaccacaagattcagatcagcaaagtcaacgagctggcccagattctccaagaagttgcaaactctgcgagtgatcttcttgcagtggct

SEQ ID NO: 876 - protein, 263 aa, synthetic construct
  REGION 1..263: note = Round 3 (Activity)
MVSAHFILIHSICHGAWLWYKLIPLLQSAGHNVTAIDLWASGINPRQLEQIGTWEQYSEPLFTLIESIPEGKKVILVGESGGGINIALAAEKYPEKVSALVFHNALMPDIDHSPAFVYKKYREVFTDWKDSIFSNYTYGNDTVTAVELGDRTLAENIFSNSPIEDVELAKHLVRKGSFFEQDLDTLPNFTSEGYGSIRRVYVYGEEDQIFSRDFQLWQINNYKPDKVYCVPSADHKIQISKVNELAQILQEVANSASDLLAVA

SEQ ID NO: 877 - DNA, 789 bp, synthetic construct
  misc_feature 1..789: note = Round 3 (Activity)
  source 1..789: mol_type = other DNA
atggttagtgcgcattttattctgatccacagtatttgccatggcgcctggctgtggtataaactgatcccgttattacagtctgcaggtcataacgttacggcgattgatctttgggctagcgggatcaaccctcgccaactggaacagattggcacatgggagcagtactcagaaccattgttcaccctgatcgaatcgattccggaaggtaagaaagtcattctggtaggagaatccggtggcggcatcaatattgcactggccgcggagaaatatccggagaaagtgagcgccctcgtctttcacaacgcacttatgcccgatatcgatcacagtccagcgttcgtgtataagaaatatattgaagttttcactgactggaaagattcgatcttcagcaattatacctacggtaacgacacggttaccgcggtggaattgggagatcgtactctggccgagaacatcttctccaattctccgattgaagatgtagaactggcgaaacatctggtccgcaaaggctccttctttgagcaagacttggataccctgccgaactttacgtcggaagggtatggttcaattcgtcgtgtgtatgtttacggcgaagaagaccagatctttagccgcgattttcagttatggcaaattaataattataagcctgataaagtgtactgtgtaccgagtgctgaccacaagattcagatcagcaaagtcaacgagctggcccagattctccaagaagttgcaaactctgcgagtgatcttcttgcagtggct

SEQ ID NO: 878 - protein, 263 aa, synthetic construct
  REGION 1..263: note = Round 3 (Activity)
MVSAHFILIHSICHGAWLWYKLIPLLQSAGHNVTAIDLWASGINPRQLEQIGTWEQYSEPLFTLIESIPEGKKVILVGESGGGINIALAAEKYPEKVSALVFHNALMPDIDHSPAFVYKKYIEVFTDWKDSIFSNYTYGNDTVTAVELGDRTLAENIFSNSPIEDVELAKHLVRKGSFFEQDLDTLPNFTSEGYGSIRRVYVYGEEDQIFSRDFQLWQINNYKPDKVYCVPSADHKIQISKVNELAQILQEVANSASDLLAVA

SEQ ID NO: 879 - DNA, 789 bp, synthetic construct
  misc_feature 1..789: note = Round 3 (Activity)
  source 1..789: mol_type = other DNA
atggttagtgcgcattttattctgatccacagtatttgccatggcgcctggctgtggtataaactgatcccgttattacagtctgcaggtcataacgttacggcgattgatctttgggctagcgggatcaaccctcgccaactggaacagattggcacatgggagcagtactcagaaccattgttcaccctgatcgaatcgattccggaaggtaagaaagtcattctggtaggagaatccggtggcggcatcaatattgcactggccgcggagaaatatccggagaaagtgagcgccctcgtctttcacaacgcacttatgcccgatatcgatcacagtccagcgttcgtgtataagaaatattgtgaagttttcactgactggaaagattcgatcttcagcaattatacctacggtaacgacacggttaccgcggtggaattgggagatcgtactctggccgagaacatcttctccaattctccgattgaagatgtagaactggcgaaacatctggtccgcaaaggctccttctttgagcaagacttggataccctgccgaactttacgtcggaagggtatggttcaattcgtcgtgtgtatgtttacggcgaagaagaccagatctttagccgcgattttcagttatggcaaattaataattataagcctgataaagtgtactgtgtaccgagtgctgaccacaagattcagatcagcaaagtcaacgagctggcccagattctccaagaagttgcaaactctgcgagtgatcttcttgcagtggct

SEQ ID NO: 880 - protein, 263 aa, synthetic construct
  REGION 1..263: note = Round 3 (Activity)
MVSAHFILIHSICHGAWLWYKLIPLLQSAGHNVTAIDLWASGINPRQLEQIGTWEQYSEPLFTLIESIPEGKKVILVGESGGGINIALAAEKYPEKVSALVFHNALMPDIDHSPAFVYKKYCEVFTDWKDSIFSNYTYGNDTVTAVELGDRTLAENIFSNSPIEDVELAKHLVRKGSFFEQDLDTLPNFTSEGYGSIRRVYVYGEEDQIFSRDFQLWQINNYKPDKVYCVPSADHKIQISKVNELAQILQEVANSASDLLAVA

SEQ ID NO: 881 - DNA, 789 bp, synthetic construct
  misc_feature 1..789: note = Round 3 (Activity)
  source 1..789: mol_type = other DNA
atggttagtgcgcattttattctgatccacagtatttgccatggcgcctggctgtggtataaactgatcccgttattacagtctgcaggtcataacgttacggcgattgatctttgggctagcgggatcaaccctcgccaactggaacagattggcacatgggagcagtactcagaaccattgttcaccctgatcgaatcgattccggaaggtaagaaagtcattctggtaggagaatccggtggcggcatcaatattgcactggccgcggagaaatatccggagaaagtgagcgccctcgtctttcacaacgcacttatgcccgatatcgatcacagtccagcgttcgtgtataagaaatatcaggaagttttcactgactggaaagattcgatcttcagcaattatacctacggtaacgacacggttaccgcggtggaattgggagatcgtactctggccgagaacatcttctccaattctccgattgaagatgtagaactggcgaaacatctggtccgcaaaggctccttctttgagcaagacttggataccctgccgaactttacgtcggaagggtatggttcaattcgtcgtgtgtatgtttacggcgaagaagaccagatctttagccgcgattttcagttatggcaaattaataattataagcctgataaagtgtactgtgtaccgagtgctgaccacaagattcagatcagcaaagtcaacgagctggcccagattctccaagaagttgcaaactctgcgagtgatcttcttgcagtggct

SEQ ID NO: 882 - protein, 263 aa, synthetic construct
  REGION 1..263: note = Round 3 (Activity)
MVSAHFILIHSICHGAWLWYKLIPLLQSAGHNVTAIDLWASGINPRQLEQIGTWEQYSEPLFTLIESIPEGKKVILVGESGGGINIALAAEKYPEKVSALVFHNALMPDIDHSPAFVYKKYQEVFTDWKDSIFSNYTYGNDTVTAVELGDRTLAENIFSNSPIEDVELAKHLVRKGSFFEQDLDTLPNFTSEGYGSIRRVYVYGEEDQIFSRDFQLWQINNYKPDKVYCVPSADHKIQISKVNELAQILQEVANSASDLLAVA

SEQ ID NO: 883 - DNA, 789 bp, synthetic construct
  misc_feature 1..789: note = Round 3 (Selectivity)
  source 1..789: mol_type = other DNA
atggttagtgcgcattttattctgatccacagtatttgccatggcgcctggctgtggtataaactgatcccgttattacagtctgcaggtcataacgttacggcgattgatctttgggctagcgggatcaaccctcgccaactggaacagattggcacatgggagcagtactcagaaccattgttcaccctgatcgaatcgattccggaaggtaagaaagtcattctggtaggagaatccggtggcggcatcaatattgcactggccgcggagaaatatccggagaaagtgagcgccctcgtctttcacaacgcacttatgcccgatatcgatcacagtccagcgttcgtgtataagaaatatatggaagttttcactgactggaaagattcgatcttcagcaattatacctacggtaacgacacggttaccgcggtggaattgggagatcgtactctggccgagaacatcttctccaattctccgattgaagatgtagaactggcgaaacatctggtccgcaaaggctccttctttgagcaagacttggataccctgccgaactttacgtcggaagggtatggttcaattcgtcgtgtgtatgtttacggcgaagaagaccagatctttagccgcgattttcagttatggcaaattaataattataagcctgataaagtgtactgtgtaccgagtgctgaccacaagattcagatcagcaaagtcaacgagctggcccagattctccaagaagttgcaaactctgcgagtgatcttcttgcagtggct

SEQ ID NO: 884 - protein, 263 aa, synthetic construct
  REGION 1..263: note = Round 3 (Selectivity)
MVSAHFILIHSICHGAWLWYKLIPLLQSAGHNVTAIDLWASGINPRQLEQIGTWEQYSEPLFTLIESIPEGKKVILVGESGGGINIALAAEKYPEKVSALVFHNALMPDIDHSPAFVYKKYMEVFTDWKDSIFSNYTYGNDTVTAVELGDRTLAENIFSNSPIEDVELAKHLVRKGSFFEQDLDTLPNFTSEGYGSIRRVYVYGEEDQIFSRDFQLWQINNYKPDKVYCVPSADHKIQISKVNELAQILQEVANSASDLLAVA

SEQ ID NO: 885 - DNA, 789 bp, synthetic construct
  misc_feature 1..789: note = Round 3 (Activity)
  source 1..789: mol_type = other DNA
atggttagtgcgcattttattctgatccacagtatttgccatggcgcctggctgtggtataaactgatcccgttattacagtctgcaggtcataacgttacggcgattgatctttgggctagcgggatcaaccctcgccaactggaacagattggcacatgggagcagtactcagaaccattgttcaccctgatcgaatcgattccggaaggtaagaaagtcattctggtaggagaatccggtggcggcatcaatattgcactggccgcggagaaatatccggagaaagtgagcgccctcgtctttcacaacgcacttatgcccgatatcgatcacagtccagcgttcgtgtataagaaatatacggaagttttcactgactggaaagattcgatcttcagcaattatacctacggtaacgacacggttaccgcggtggaattgggagatcgtactctggccgagaacatcttctccaattctccgattgaagatgtagaactggcgaaacatctggtccgcaaaggctccttctttgagcaagacttggataccctgccgaactttacgtcggaagggtatggttcaattcgtcgtgtgtatgtttacggcgaagaagaccagatctttagccgcgattttcagttatggcaaattaataattataagcctgataaagtgtactgtgtaccgagtgctgaccacaagattcagatcagcaaagtcaacgagctggcccagattctccaagaagttgcaaactctgcgagtgatcttcttgcagtggct

SEQ ID NO: 886 - protein, 263 aa, synthetic construct
  REGION 1..263: note = Round 3 (Activity)
MVSAHFILIHSICHGAWLWYKLIPLLQSAGHNVTAIDLWASGINPRQLEQIGTWEQYSEPLFTLIESIPEGKKVILVGESGGGINIALAAEKYPEKVSALVFHNALMPDIDHSPAFVYKKYTEVFTDWKDSIFSNYTYGNDTVTAVELGDRTLAENIFSNSPIEDVELAKHLVRKGSFFEQDLDTLPNFTSEGYGSIRRVYVYGEEDQIFSRDFQLWQINNYKPDKVYCVPSADHKIQISKVNELAQILQEVANSASDLLAVA

SEQ ID NO: 887 - DNA, 789 bp, synthetic construct
  misc_feature 1..789: note = Round 3 (Activity)
  source 1..789: mol_type = other DNA
atggttagtgcgcattttattctgatccacagtatttgccatggcgcctggctgtggtataaactgatcccgttattacagtctgcaggtcataacgttacggcgattgatctttgggctagcgggatcaaccctcgccaactggaacagattggcacatgggagcagtactcagaaccattgttcaccctgatcgaatcgattccggaaggtaagaaagtcattctggtaggagaatccggtggcggcatcaatattgcactggccgcggagaaatatccggagaaagtgagcgccctcgtctttcacaacgcacttatgcccgatatcgatcacagtccagcgttcgtgtataagaaatatgttgaagttttcactgactggaaagattcgatcttcagcaattatacctacggtaacgacacggttaccgcggtggaattgggagatcgtactctggccgagaacatcttctccaattctccgattgaagatgtagaactggcgaaacatctggtccgcaaaggctccttctttgagcaagacttggataccctgccgaactttacgtcggaagggtatggttcaattcgtcgtgtgtatgtttacggcgaagaagaccagatctttagccgcgattttcagttatggcaaattaataattataagcctgataaagtgtactgtgtaccgagtgctgaccacaagattcagatcagcaaagtcaacgagctggcccagattctccaagaagttgcaaactctgcgagtgatcttcttgcagtggct

SEQ ID NO: 888 - protein, 263 aa, synthetic construct
  REGION 1..263: note = Round 3 (Activity)
MVSAHFILIHSICHGAWLWYKLIPLLQSAGHNVTAIDLWASGINPRQLEQIGTWEQYSEPLFTLIESIPEGKKVILVGESGGGINIALAAEKYPEKVSALVFHNALMPDIDHSPAFVYKKYVEVFTDWKDSIFSNYTYGNDTVTAVELGDRTLAENIFSNSPIEDVELAKHLVRKGSFFEQDLDTLPNFTSEGYGSIRRVYVYGEEDQIFSRDFQLWQINNYKPDKVYCVPSADHKIQISKVNELAQILQEVANSASDLLAVA

SEQ ID NO: 889 - DNA, 789 bp, synthetic construct
  misc_feature 1..789: note = Round 3 (Activity)
  source 1..789: mol_type = other DNA
atggttagtgcgcattttattctgatccacagtatttgccatggcgcctggctgtggtataaactgatcccgttattacagtctgcaggtcataacgttacggcgattgatctttgggctagcgggatcaaccctcgccaactggaacagattggcacatgggagcagtactcagaaccattgttcaccctgatcgaatcgattccggaaggtaagaaagtcattctggtaggagaatccggtggcggcatcaatattgcactggccgcggagaaatatccggagaaagtgagcgccctcgtctttcacaacgcacttatgcccgatatcgatcacagtccagcgttcgtgtataagaaatataaggaagttttcactgactggaaagattcgatcttcagcaattatacctacggtaacgacacggttaccgcggtggaattgggagatcgtactctggccgagaacatcttctccaattctccgattgaagatgtagaactggcgaaacatctggtccgcaaaggctccttctttgagcaagacttggataccctgccgaactttacgtcggaagggtatggttcaattcgtcgtgtgtatgtttacggcgaagaagaccagatctttagccgcgattttcagttatggcaaattaataattataagcctgataaagtgtactgtgtaccgagtgctgaccacaagattcagatcagcaaagtcaacgagctggcccagattctccaagaagttgcaaactctgcgagtgatcttcttgcagtggct

SEQ ID NO: 890 - protein, 263 aa, synthetic construct
  REGION 1..263: note = Round 3 (Activity)
MVSAHFILIHSICHGAWLWYKLIPLLQSAGHNVTAIDLWASGINPRQLEQIGTWEQYSEPLFTLIESIPEGKKVILVGESGGGINIALAAEKYPEKVSALVFHNALMPDIDHSPAFVYKKYKEVFTDWKDSIFSNYTYGNDTVTAVELGDRTLAENIFSNSPIEDVELAKHLVRKGSFFEQDLDTLPNFTSEGYGSIRRVYVYGEEDQIFSRDFQLWQINNYKPDKVYCVPSADHKIQISKVNELAQILQEVANSASDLLAVA

SEQ ID NO: 891 - DNA, 789 bp, synthetic construct
  misc_feature 1..789: note = Round 3 (Activity)
  source 1..789: mol_type = other DNA
atggttagtgcgcattttattctgatccacagtatttgccatggcgcctggctgtggtataaactgatcccgttattacagtctgcaggtcataacgttacggcgattgatctttgggctagcgggatcaaccctcgccaactggaacagattggcacatgggagcagtactcagaaccattgttcaccctgatcgaatcgattccggaaggtaagaaagtcattctggtaggagaatccggtggcggcatcaatattgcactggccgcggagaaatatccggagaaagtgagcgccctcgtctttcacaacgcacttatgcccgatatcgatcacagtccagcgttcgtgtataagaaatatttggaagttttcactgactggaaagattcgatcttcagcaattatacctacggtaacgacacggttaccgcggtggaattgggagatcgtactctggccgagaacatcttctccaattctccgattgaagatgtagaactggcgaaacatctggtccgcaaaggctccttctttgagcaagacttggataccctgccgaactttacgtcggaagggtatggttcaattcgtcgtgtgtatgtttacggcgaagaagaccagatctttagccgcgattttcagttatggcaaattaataattataagcctgataaagtgtactgtgtaccgagtgctgaccacaagattcagatcagcaaagtcaacgagctggcccagattctccaagaagttgcaaactctgcgagtgatcttcttgcagtggct

SEQ ID NO: 892 - protein, 263 aa, synthetic construct
  REGION 1..263: note = Round 3 (Activity)
MVSAHFILIHSICHGAWLWYKLIPLLQSAGHNVTAIDLWASGINPRQLEQIGTWEQYSEPLFTLIESIPEGKKVILVGESGGGINIALAAEKYPEKVSALVFHNALMPDIDHSPAFVYKKYLEVFTDWKDSIFSNYTYGNDTVTAVELGDRTLAENIFSNSPIEDVELAKHLVRKGSFFEQDLDTLPNFTSEGYGSIRRVYVYGEEDQIFSRDFQLWQINNYKPDKVYCVPSADHKIQISKVNELAQILQEVANSASDLLAVA

SEQ ID NO: 893 - DNA, 789 bp, synthetic construct
  misc_feature 1..789: note = Round 3 (Selectivity)
  source 1..789: mol_type = other DNA
atggttagtgcgcattttattctgatccacagtatttgccatggcgcctggctgtggtataaactgatcccgttattacagtctgcaggtcataacgttacggcgattgatctttgggctagcggggaaaatcctcgccaactggaacagattggcacatgggagcagtactcagaaccattgttcaccctgatcgaatcgattccggaaggtaagaaagtcattctggtaggagaatccggtggcggcatcaatattgcactggccgcggagaaatatccggagaaagtgagcgccctcgtctttagtaacgcacttatgcccgatatcgatcacagtccagcgttcgtgtataagaaatatagcgaagttttcactgactggaaagattcgatcttcagcaattatacctacggtaacgacacggttaccgcggtggaattgggagatcgtactctggccgagaacatcttctccaattctccgattgaagatgtagaactggcgaaacatctggtccgcaaaggctccttctttgagcaagacttggataccctgccgaactttacgtcggaagggtatggttcaattcgtcgtgtgtatgtttacggcgaagaagaccagatctttagccgcgattttcagttatggcaaattaataattataagcctgataaagtgtactgtgtaccgagtgctgaccacaagattatgatcagcaaggtcaacgagctggcccagattctccaagaagttgcaaactctgcgagtgatcttcttgcagtggct

SEQ ID NO: 894 - protein, 263 aa, synthetic construct
  REGION 1..263: note = Round 3 (Selectivity)
MVSAHFILIHSICHGAWLWYKLIPLLQSAGHNVTAIDLWASGENPRQLEQIGTWEQYSEPLFTLIESIPEGKKVILVGESGGGINIALAAEKYPEKVSALVFSNALMPDIDHSPAFVYKKYSEVFTDWKDSIFSNYTYGNDTVTAVELGDRTLAENIFSNSPIEDVELAKHLVRKGSFFEQDLDTLPNFTSEGYGSIRRVYVYGEEDQIFSRDFQLWQINNYKPDKVYCVPSADHKIMISKVNELAQILQEVANSASDLLAVA

SEQ ID NO: 895 - DNA, 789 bp, synthetic construct
  misc_feature 1..789: note = Round 3 (Selectivity)
  source 1..789: mol_type = other DNA
atggttagtgcgcattttattctgatccacagtatttgccatggcgcctggctgtggtataaactgatcccgttattacagtctgcaggtcataacgttacggcgattgatctttgggctagcgggattaatcctcgccaactggaacagattggcacatgggagcagtactcagaaccattgttcaccctgatcgaatcgattccggaaggtaagaaagtcattctggtaggagaatccggtggcggcatcaatattgcactggccgcggagaaatatccggagaaagtgagcgccctcgtctttagtaacgcacttatgcccgatatcgatcacagtccagcgttcgtgtataagaaatggagcgaagttttcactgactggaaagattcgatcttcagcaattatacctacggtaacgacacggttaccgcggtggaattgggagatcgtactctggccgagaacatcttctcgaattctccgattgaagatgtagaactggcgaaacatcgtgtccgcaaaggctccttctttgagcaagacttggataccctgccgaactttacgtcggaagggtatggttcaattcgtcgtgtgtatgtttacggcgaagaagaccagatctttagccgcgattttcagttatggcaaattaataattataagcctgataaagtgtactgtgtaccgagtgctgaccacaagattatgatcagcaaggtcaacgagctggcccagattctccaagaagttgcaaactctgcgagtgatcttcttgcagtggct

SEQ ID NO: 896 - protein, 263 aa, synthetic construct
  REGION 1..263: note = Round 3 (Selectivity)
MVSAHFILIHSICHGAWLWYKLIPLLQSAGHNVTAIDLWASGINPRQLEQIGTWEQYSEPLFTLIESIPEGKKVILVGESGGGINIALAAEKYPEKVSALVFSNALMPDIDHSPAFVYKKWSEVFTDWKDSIFSNYTYGNDTVTAVELGDRTLAENIFSNSPIEDVELAKHRVRKGSFFEQDLDTLPNFTSEGYGSIRRVYVYGEEDQIFSRDFQLWQINNYKPDKVYCVPSADHKIMISKVNELAQILQEVANSASDLLAVA

SEQ ID NO: 897 - DNA, 789 bp, synthetic construct
  misc_feature 1..789: note = Round 3 (Selectivity)
  source 1..789: mol_type = other DNA
atggttagtgcgcattttattctgatccacagtatttgccatggcgcctggctgtggtataaactgatcccgttattacagtctgcaggtcataacgttacggcgattgatctttgggctagcgggagtaatcctcgccaactggaacagattggcacatgggagcagtactcagaaccattgttcaccctgatcgaatcgattccggaaggtaagaaagtcattctggtaggagaatccggtggcggcatcaatattgcactggccgcggagaaatatccggagaaagtgagcgccctcgtctttagtaacgcacttatgcccgatatcgatcacagtccagcgttcgtgtataagaaatatagcgaagttttcactgactggaaagattcgatcttcagcaattatacctacggtaacgacacggttaccgcggtggaattgggagatcgtactctggccgagaacatcttctcgaattctccgattgaagatgtagaactggcgaaacatctggtccgcaaaggctccttctttgagcaagacttggataccctgccgaactttacgtcggaagggtatggttcaattcgtcgtgtgtatgtttacggcgaagaagaccagatctttagccgcgattttcagttatggcaaattaataattataagcctgataaagtgtactgtgtaccgagtgctgaccacaagattatgatcagccgtgtcaacgagctggcccagattctccaagaagttgcaaactctgcgagtgatcttcttgcagtggct

SEQ ID NO: 898 - protein, 263 aa, synthetic construct
  REGION 1..263: note = Round 3 (Selectivity)
MVSAHFILIHSICHGAWLWYKLIPLLQSAGHNVTAIDLWASGSNPRQLEQIGTWEQYSEPLFTLIESIPEGKKVILVGESGGGINIALAAEKYPEKVSALVFSNALMPDIDHSPAFVYKKYSEVFTDWKDSIFSNYTYGNDTVTAVELGDRTLAENIFSNSPIEDVELAKHLVRKGSFFEQDLDTLPNFTSEGYGSIRRVYVYGEEDQIFSRDFQLWQINNYKPDKVYCVPSADHKIMISRVNELAQILQEVANSASDLLAVA

SEQ ID NO: 899 - DNA, 789 bp, synthetic construct
  misc_feature 1..789: note = Round 3 (Selectivity)
  source 1..789: mol_type = other DNA
atggttagtgcgcattttattctgatccacagtatttgccatggcgcctggctgtggtataaactgatcccgttattacagtctgcaggtcataacgttacggcgattgatctttgggctagcggggaaaatcctcgccaactggaacagattggcacatgggagcagtactcagaaccattgttcaccctgatcgaatcgattccggaaggtaagaaagtcattctggtaggagaatccggtggcggcatcaatattgcactggccgcggagaaatatccggagaaagtgagcgccctcgtctttagtaacgcacttatgcccgatatcgatcacagtccagcgttcgtgtataagaaatggagcgaagttttcactgactggaaagattcgatcttcagcaattatacctacggtaacgacacggttaccgcggtggaattgggagatcgtactctggccgagaacatcttctccaattctccgattgaagatgtagaactggcgaaacatcgtgtccgcaaaggctccttctttgagcaagacttggataccctgccgaactttacgtcggaagggtatggttcaattcgtcgtgtgtatgtttacggcgaagaagaccagatctttagccgcgattttcagttatggcaaattaataattataagcctgataaagtgtactgtgtaccgagtgctgaccacaagattcaaatcagccgtgtcaacgagctggcccagattctccaagaagttgcaaactctgcgagtgatcttcttgcagtggct

SEQ ID NO: 900 - protein, 263 aa, synthetic construct
  REGION 1..263: note = Round 3 (Selectivity)
MVSAHFILIHSICHGAWLWYKLIPLLQSAGHNVTAIDLWASGENPRQLEQIGTWEQYSEPLFTLIESIPEGKKVILVGESGGGINIALAAEKYPEKVSALVFSNALMPDIDHSPAFVYKKWSEVFTDWKDSIFSNYTYGNDTVTAVELGDRTLAENIFSNSPIEDVELAKHRVRKGSFFEQDLDTLPNFTSEGYGSIRRVYVYGEEDQIFSRDFQLWQINNYKPDKVYCVPSADHKIQISRVNELAQILQEVANSASDLLAVA

SEQ ID NO: 901 - DNA, 789 bp, synthetic construct
  misc_feature 1..789: note = Round 3 (Selectivity)
  source 1..789: mol_type = other DNA
atggttagtgcgcattttattctgatccacagtatttgccatggcgcctggctgtggtataaactgatcccgttattacagtctgcaggtcataacgttacggcgattgatctttgggctagcgggattaatcctcgccaactggaacagattggcacatgggagcagtactcagaaccattgttcaccctgatcgaatcgattccggaaggtaagaaagtcattctggtaggagaatccggtggcggcatcaatattgcactggccgcggagaaatatccggagaaagtgagcgccctcgtctttagtaacgcacttatgcccgatatcgatcacagtccagcgttcgtgtataagaaatatagcgaagttttcactgactggaaagattcgatcttcagcaattatacctacggtaacgacacggttaccgcggtggaattgggagatcgtactctggccgagaacatcttctcgaattctccgattgaagatgtagaactggcgaaacatcgtgtccgcaaaggctccttctttgagcaagacttggataccctgccgaactttacgtcggaagggtatggttcaattcgtcgtgtgtatgtttacggcgaagaagaccagatctttagccgcgattttcagttatggcaaattaataattataagcctgataaagtgtactgtgtaccgagtgctgaccacaagattatgatcagcaaggtcaacgagctggcccagattctccaagaagttgcaaactctgcgagtgatcttcttgcagtggct

SEQ ID NO: 902 - protein, 263 aa, synthetic construct
  REGION 1..263: note = Round 3 (Selectivity)
MVSAHFILIHSICHGAWLWYKLIPLLQSAGHNVTAIDLWASGINPRQLEQIGTWEQYSEPLFTLIESIPEGKKVILVGESGGGINIALAAEKYPEKVSALVFSNALMPDIDHSPAFVYKKYSEVFTDWKDSIFSNYTYGNDTVTAVELGDRTLAENIFSNSPIEDVELAKHRVRKGSFFEQDLDTLPNFTSEGYGSIRRVYVYGEEDQIFSRDFQLWQINNYKPDKVYCVPSADHKIMISKVNELAQILQEVANSASDLLAVA

SEQ ID NO: 903 - DNA, 789 bp, synthetic construct
  misc_feature 1..789: note = Round 3 (Selectivity)
  source 1..789: mol_type = other DNA
atggttagtgcgcattttattctgatccacagtatttgccatggcgcctggctgtggtataaactgatcccgttattacagtctgcaggtcataacgttacggcgattgatctttgggctagcgggattgtgcctcgccaactggaacagattggcacatgggagcagtactcagaaccattgttcaccctgatcgaatcgattccggaaggtaagaaagtcattctggtaggagaatccggtggcggcatcaatattgcactggccgcggagaaatatccggagaaagtgagcgccctcgtctttagtaacgcacttatgcccgatatcgatcacagtccagcgttcgtgtataagaaatggagcgaagttttcactgactggaaagattcgatcttcagcaattatacctacggtaacgacacggttaccgcggtggaattgggagatcgtactctggccgagaacatcttctccaattctccgattgaagatgtagaactggcgaaacatctggtccgcaaaggctccttctttgagcaagacttggataccctgccgaactttacgtcggaagggtatggttcaattcgtcgtgtgtatgtttacggcgaagaagaccagatctttagccgcgattttcagttatggcaaattaataattataagcctgataaagtgtactgtgtaccgagtgctgaccacaagattatgatcagcaaggtcaacgagctggcccagattctccaagaagttgcaaactctgcgagtgatcttcttgcagtggct

SEQ ID NO: 904 - protein, 263 aa, synthetic construct
  REGION 1..263: note = Round 3 (Selectivity)
MVSAHFILIHSICHGAWLWYKLIPLLQSAGHNVTAIDLWASGIVPRQLEQIGTWEQYSEPLFTLIESIPEGKKVILVGESGGGINIALAAEKYPEKVSALVFSNALMPDIDHSPAFVYKKWSEVFTDWKDSIFSNYTYGNDTVTAVELGDRTLAENIFSNSPIEDVELAKHLVRKGSFFEQDLDTLPNFTSEGYGSIRRVYVYGEEDQIFSRDFQLWQINNYKPDKVYCVPSADHKIMISKVNELAQILQEVANSASDLLAVA

SEQ ID NO: 905 - DNA, 789 bp, synthetic construct
  misc_feature 1..789: note = Round 3 (Selectivity)
  source 1..789: mol_type = other DNA
atggttagtgcgcattttattctgatccacagtatttgccatggcgcctggctgtggtataaactgatcccgttattacagtctgcaggtcataacgttacggcgattgatctttgggctagcgggattgtgcctcgccaactggaacagattggcacatgggagcagtactcagaaccattgttcaccctgatcgaatcgattccggaaggtaagaaagtcattctggtaggagaatccggtggcggcatcaatattgcactggccgcggagaaatatccggagaaagtgagcgccctcgtctttagtaacgcacttatgcccgatatcgatcacagtccagcgttcgtgtataagaaatatagcgaagttttcactgactggaaagattcgatcttcagcaattatacctacggtaacgacacggttaccgcggtggaattgggagatcgtactctggccgagaacatcttctcgaattctccgattgaagatgtagaactggcgaaacatctggtccgcaaaggctccttctttgagcaagacttggataccctgccgaactttacgtcggaagggtatggttcaattcgtcgtgtgtatgtttacggcgaagaagaccagatctttagccgcgattttcagttatggcaaattaataattataagcctgataaagtgtactgtgtaccgagtgctgaccacaagattatgatcagccgtgtcaacgagctggcccagattctccaagaagttgcaaactctgcgagtgatcttcttgcagtggct

SEQ ID NO: 906 - protein, 263 aa, synthetic construct
  REGION 1..263: note = Round 3 (Selectivity)
MVSAHFILIHSICHGAWLWYKLIPLLQSAGHNVTAIDLWASGIVPRQLEQIGTWEQYSEPLFTLIESIPEGKKVILVGESGGGINIALAAEKYPEKVSALVFSNALMPDIDHSPAFVYKKYSEVFTDWKDSIFSNYTYGNDTVTAVELGDRTLAENIFSNSPIEDVELAKHLVRKGSFFEQDLDTLPNFTSEGYGSIRRVYVYGEEDQIFSRDFQLWQINNYKPDKVYCVPSADHKIMISRVNELAQILQEVANSASDLLAVA

SEQ ID NO: 907 - DNA, 789 bp, synthetic construct
  misc_feature 1..789: note = Round 3 (Selectivity)
  source 1..789: mol_type = other DNA
atggttagtgcgcattttattctgatccacagtatttgccatggcgcctggctgtggtataaactgatcccgttattacagtctgcaggtcataacgttacggcgattgatctttgggctagcgggattgtgcctcgccaactggaacagattggcacatgggagcagtactcagaaccattgttcaccctgatcgaatcgattccggaaggtaagaaagtcattctggtaggagaatccggtggcggcatcaatattgcactggccgcggagaaatatccggagaaagtgagcgccctcgtctttagtaacgcacttatgcccgatatcgatcacagtccagcgttcgtgtataagaaatacagcgaagttttcactgactggaaagattcgatcttcagcaattatacctacggtaacgacacggttaccgcggtggaattgggagatcgtactctggccgagaacatcttctccaattctccgattgaagatgtagaactggcgaaacatctggtccgcaaaggctccttctttgagcaagacttggataccctgccgaactttacgtcggaagggtatggttcaattcgtcgtgtgtatgtttacggcgaagaagaccagatctttagccgcgattttcagttatggcaaattaataattataagcctgataaagtgtactgtgtaccgagtgctgaccacaagattatgatcagcaaggtcaacgagctggcccagattctccaagaagttgcaaactctgcgagtgatcttcttgcagtggct

SEQ ID NO: 908 - protein, 263 aa, synthetic construct
  REGION 1..263: note = Round 3 (Selectivity)
MVSAHFILIHSICHGAWLWYKLIPLLQSAGHNVTAIDLWASGIVPRQLEQIGTWEQYSEPLFTLIESIPEGKKVILVGESGGGINIALAAEKYPEKVSALVFSNALMPDIDHSPAFVYKKYSEVFTDWKDSIFSNYTYGNDTVTAVELGDRTLAENIFSNSPIEDVELAKHLVRKGSFFEQDLDTLPNFTSEGYGSIRRVYVYGEEDQIFSRDFQLWQINNYKPDKVYCVPSADHKIMISKVNELAQILQEVANSASDLLAVA

SEQ ID NO: 909 - DNA, 789 bp, synthetic construct
  misc_feature 1..789: note = Round 3 (Selectivity)
  source 1..789: mol_type = other DNA
atggttagtgcgcattttattctgatccacagtatttgccatggcgcctggctgtggtataaactgatcccgttattacagtctgcaggtcataacgttacggcgattgatctttgggctagcgggagtaatcctcgccaactggaacagattggcacatgggagcagtactcagaaccattgttcaccctgatcgaatcgattccggaaggtaagaaagtcattctggtaggagaatccggtggcggcatcaatattgcactggccgcggagaaatatccggagaaagtgagcgccctcgtctttcataacgcacttatgcccgatatcgatcacagtccagcgttcgtgtataagaaatatagcgaagttttcactgactggaaagattcgatcttcagcaattatacctacggtaacgacacggttaccgcggtggaattgggagatcgtactctggccgagaacatcttctccaattctccgattgaagatgtagaactggcgaaacatctggtccgcaaaggctccttctttgagcaagacttggataccctgccgaactttacgtcggaagggctgggttcaattcgtcgtgtgtatgtttacggcgaagaagaccagatctttagccgcgattttcagttatggcaaattaataattataagcctgataaagtgtactgtgtaccgagtgctgaccacaagattatgatcagcaaggtcaacgagctggcccagattctccaagaagttgcaaactctgcgagtgatcttcttgcagtggct

SEQ ID NO: 910 - protein, 263 aa, synthetic construct
  REGION 1..263: note = Round 3 (Selectivity)
MVSAHFILIHSICHGAWLWYKLIPLLQSAGHNVTAIDLWASGSNPRQLEQIGTWEQYSEPLFTLIESIPEGKKVILVGESGGGINIALAAEKYPEKVSALVFHNALMPDIDHSPAFVYKKYSEVFTDWKDSIFSNYTYGNDTVTAVELGDRTLAENIFSNSPIEDVELAKHLVRKGSFFEQDLDTLPNFTSEGLGSIRRVYVYGEEDQIFSRDFQLWQINNYKPDKVYCVPSADHKIMISKVNELAQILQEVANSASDLLAVA

SEQ ID NO: 911 - DNA, 789 bp, synthetic construct
  misc_feature 1..789: note = Round 3 (Selectivity)
  source 1..789: mol_type = other DNA
atggttagtgcgcattttattctgatccacagtatttgccatggcgcctggctgtggtataaactgatcccgttattacagtctgcaggtcataacgttacggcgattgatctttgggctagcgggcaaaatcctcgccaactggaacagattggcacatgggagcagtactcagaaccattgttcaccctgatcgaatcgattccggaaggtaagaaagtcattctggtaggagaatccggtggcggcatcaatattgcactggccgcggagaaatatccggagaaagtgagcgccctcgtctttcataacgcacttatgcccgatatcgatcacagtccagcgttcgtgtataagaaatggagcgaagttttcactgactggaaagattcgatcttcagcaattatacctacggtaacgacacggttaccgcggtggaattgggagatcgtactctggccgagaacatcttctccaattctccgattgaagatgtagaactggcgaaacatctggtccgcaaaggctccttctttgagcaagacttggataccctgccgaactttacgtcggaagggtatggttcaattcgtcgtgtgtatgtttacggcgaagaagaccagatctttagccgcgattttcagttatggcaaattaataattataagcctgataaagtgtactgtgtaccgagtgctgaccacaagattcaaatcagcaaggtcaacgagctggcccagattctccaagaagttgcaaactctgcgagtgatcttcttgcagtggct

SEQ ID NO: 912 - protein, 263 aa, synthetic construct
  REGION 1..263: note = Round 3 (Selectivity)
MVSAHFILIHSICHGAWLWYKLIPLLQSAGHNVTAIDLWASGQNPRQLEQIGTWEQYSEPLFTLIESIPEGKKVILVGESGGGINIALAAEKYPEKVSALVFHNALMPDIDHSPAFVYKKWSEVFTDWKDSIFSNYTYGNDTVTAVELGDRTLAENIFSNSPIEDVELAKHLVRKGSFFEQDLDTLPNFTSEGYGSIRRVYVYGEEDQIFSRDFQLWQINNYKPDKVYCVPSADHKIQISKVNELAQILQEVANSASDLLAVA

SEQ ID NO: 913 - DNA, 789 bp, synthetic construct
  misc_feature 1..789: note = Round 3 (Selectivity)
  source 1..789: mol_type = other DNA
atggttagtgcgcattttattctgatccacagtatttgccatggcgcctggctgtggtataaactgatcccgttattacagtctgcaggtcataacgttacggcgattgatctttgggctagcgggagtaatcctcgccaactggaacagattggcacatgggagcagtactcagaaccattgttcaccctgatcgaatcgattccggaaggtaagaaagtcattctggtaggagaatccggtggcggcatcaatattgcactggccgcggagaaatatccggagaaagtgagcgccctcgtctttcataacgcacttatgcccgatatcgatcacagtccagcgttcgtgtataagaaatatagcgaagttttcactgactggaaagattcgatcttcagcaattatacctacggtaacgacacggttaccgcggtggaattgggagatcgtactctggccgagaacatcttctccaattctccgattgaagatgtagaactggcgaaacatctggtccgcaaaggctccttctttgagcaagacttggataccctgccgaactttacgtcggaagggtatggttcaattcgtcgtgtgtatgtttacggcgaagaagaccagatctttagccgcgattttcagttatggcaaattaataattataagcctgataaagtgtactgtgtaccgagtgctgaccacaagattcaaatcagcaaggtcaacgagctggcccagattctccaagaagttgcaaactctgcgagtgatcttcttgcagtggct

SEQ ID NO: 914 - protein, 263 aa, synthetic construct
  REGION 1..263: note = Round 3 (Selectivity)
MVSAHFILIHSICHGAWLWYKLIPLLQSAGHNVTAIDLWASGSNPRQLEQIGTWEQYSEPLFTLIESIPEGKKVILVGESGGGINIALAAEKYPEKVSALVFHNALMPDIDHSPAFVYKKYSEVFTDWKDSIFSNYTYGNDTVTAVELGDRTLAENIFSNSPIEDVELAKHLVRKGSFFEQDLDTLPNFTSEGYGSIRRVYVYGEEDQIFSRDFQLWQINNYKPDKVYCVPSADHKIQISKVNELAQILQEVANSASDLLAVA

SEQ ID NO: 915 - DNA, 789 bp, synthetic construct
  misc_feature 1..789: note = Round 3 (Selectivity)
  source 1..789: mol_type = other DNA
atggttagtgcgcattttattctgatccacagtatttgccatggcgcctggctgtggtataaactgatcccgttattacagtctgcaggtcataacgttacggcgattgatctttgggctagcgggattgtgcctcgccaactggaacagattggcacatgggagcagtactcagaaccattgttcaccctgatcgaatcgattccggaaggtaagaaagtcattctggtaggagaatccggtggcggcatcaatattgcactggccgcggagaaatatccggagaaagtgagcgccctcgtctttcataacgcacttatgcccgatatcgatcacagtccagcgttcgtgtataagaaatggagcgaagttttcactgactggaaagattcgatcttcagcaattatacctacggtaacgacacggttaccgcggtggaattgggagatcgtactctggccgagaacatcttctccaattctccgattgaagatgtagaactggcgaaacatctggtccgcaaaggctccttctttgagcaagacttggataccctgccgaactttacgtcggaagggtatggttcaattcgtcgtgtgtatgtttacggcgaagaagaccagatctttagccgcgattttcagttatggcaaattaataattataagcctgataaagtgtactgtgtaccgagtgctgaccacaagattatgatcagccgtgtcaacgagctggcccagattctccaagaagttgcaaactctgcgagtgatcttcttgcagtggct

SEQ ID NO: 916 - protein, 263 aa, synthetic construct
  REGION 1..263: note = Round 3 (Selectivity)
MVSAHFILIHSICHGAWLWYKLIPLLQSAGHNVTAIDLWASGIVPRQLEQIGTWEQYSEPLFTLIESIPEGKKVILVGESGGGINIALAAEKYPEKVSALVFHNALMPDIDHSPAFVYKKWSEVFTDWKDSIFSNYTYGNDTVTAVELGDRTLAENIFSNSPIEDVELAKHLVRKGSFFEQDLDTLPNFTSEGYGSIRRVYVYGEEDQIFSRDFQLWQINNYKPDKVYCVPSADHKIMISRVNELAQILQEVANSASDLLAVA

SEQ ID NO: 917 - DNA, 789 bp, synthetic construct; identical to SEQ ID NO: 849
  misc_feature 1..789: note = Round 3 (Selectivity)
  source 1..789: mol_type = other DNA

SEQ ID NO: 918 - protein, 263 aa, synthetic construct; identical to SEQ ID NO: 850
  REGION 1..263: note = Round 3 (Selectivity)

SEQ ID NO: 919 - DNA, 789 bp, synthetic construct
  misc_feature 1..789: note = Round 3 (Selectivity)
  source 1..789: mol_type = other DNA
atggttagtgcgcattttattctgatccacagtatttgccatggcgcctggctgtggtataaactgatcccgttattacagtctgcaggtcataacgttacggcgattgatctttgggctagcgggattaatcctcgccaactggaacagattggcacatgggagcagtactcagaaccattgttcaccctgatcgaatcgattccggaaggtaagaaagtcattctggtaggagaatccggtggcggcatcaatattgcactggccgcggagaaatatccggagaaagtgagcgccctcgtctttagtaacgcacttatgcccgatatcgatcacagtccagcgttcgtgtataagaaatggagcgaagttttcactgactggaaagattcgatcttcagcaattatacctacggtaacgacacggttaccgcggtggaattgggagatcgtactctggccgagaacatcttctccaattctccgattgaagatgtagaactggcgaaacatctggtccgcaaaggctccttctttgagcaagacttggataccctgccgaactttacgtcggaagggtatggttcaattcgtcgtgtgtatgtttacggcgaagaagaccagatctttagccgcgattttcagttatggcaaattaataattataagcctgataaagtgtactgtgtaccgagtgctgaccacaagattcaaatcagcaaggtcaacgagctggcccagattctccaagaagttgcaaactctgcgagtgatcttcttgcagtggct

SEQ ID NO: 920 - protein, 263 aa, synthetic construct
  REGION 1..263: note = Round 3 (Selectivity)
MVSAHFILIHSICHGAWLWYKLIPLLQSAGHNVTAIDLWASGINPRQLEQIGTWEQYSEPLFTLIESIPEGKKVILVGESGGGINIALAAEKYPEKVSALVFSNALMPDIDHSPAFVYKKWSEVFTDWKDSIFSNYTYGNDTVTAVELGDRTLAENIFSNSPIEDVELAKHLVRKGSFFEQDLDTLPNFTSEGYGSIRRVYVYGEEDQIFSRDFQLWQINNYKPDKVYCVPSADHKIQISKVNELAQILQEVANSASDLLAVA

SEQ ID NO: 921 - DNA, 789 bp, synthetic construct
  misc_feature 1..789: note = Round 3 (Selectivity)
  source 1..789: mol_type = other DNA
atggttagtgcgcattttattctgatccacagtatttgccatggcgcctggctgtggtacaaactgatcccgttattacagtctgcaggtcataacgttacggcgattgatctttgggctagcgggcaaaaccctcgccagctggaacagattggcacatgggagcagtactcagaaccattgttcaccctgatcgaatcgattccggaaggtaagaaagtcattctggtaggagaatccggtggcggcatcaatattgcactggccgcggagaaatatccggagaaagtgagcgccctcgtctttctgaacgcacttatgcccgatatcgatcacagtccagcgttcgtgtataagaaatatagcgaagttttcactgactggaaagattcgatcttcagcaattatacctacggtaacgacacggttaccgcggtggaattgggagatcgtactctggccgagaacatcttctccaattctccgattgaagatgtagaactggcgaaacatcgtgtccgcaaaggctccttctttgagcaagacttggataccctgccgaactttacgtcggaagggtatggttcaattcgtcgtgtgtatgtttacggcgaagaagaccagatctttagccgcgattttcagttatggcaaattaataattataagcctgataaagtgtactgtgtaccgagtgctgaccacaagattcagatcagcaaagtcaacgagctggcccagattctccaagaagttgcaaactctgcgagtgatcttcttgcagtggct

SEQ ID NO: 922 - protein, 263 aa, synthetic construct
  REGION 1..263: note = Round 3 (Selectivity)
MVSAHFILIHSICHGAWLWYKLIPLLQSAGHNVTAIDLWASGQNPRQLEQIGTWEQYSEPLFTLIESIPEGKKVILVGESGGGINIALAAEKYPEKVSALVFLNALMPDIDHSPAFVYKKYSEVFTDWKDSIFSNYTYGNDTVTAVELGDRTLAENIFSNSPIEDVELAKHRVRKGSFFEQDLDTLPNFTSEGYGSIRRVYVYGEEDQIFSRDFQLWQINNYKPDKVYCVPSADHKIQISKVNELAQILQEVANSASDLLAVA

SEQ ID NO: 923 - DNA, 789 bp, synthetic construct
  misc_feature 1..789: note = Round 3 (Selectivity)
  source 1..789: mol_type = other DNA
atggttagtgcgcattttattctgatccacagtatttgccatggcgcctggctgtggtacaaactgatcccgttattacagtctgcaggtcataacgttacggcgattgatctttgggctagcgggcaaaaccctcgcggcctggaacagattggcacatgggagcagtactcagaaccattgttcaccctgatcgaatcgattccggaaggtaagaaagtcattctggtaggagaatccgggggcggcatcaatattgcactggccgcggagaaatatccggagaaagtgagcgccctcgtctttagtaacgcacttatgcccgatatcgatcacagtccagcgttcgtgtataagaaatatagcgaagttttcactgactggaaagattcgatcttcagcaattatacctacggtaacgacacggttaccgcggtggaattgggagatcgtacgctggcggagaacatcttctccaattctccgattgaagatgtagaactggcgaaacatctggtccgcaaaggctccttctttgagcaagacttggataccctgccgaactttacgtcggaagggtatggttcaattcgtcgtgtgtatgtttacggcgaagaagaccagatctttagccgcgattttcagttatggcaaattaataattataagcctgataaagtgtactgtgtaccgggtgctgaccacaagattcagatcagcaaagtcaacgagctggcccagattctccaagaagttgcaaactctgcgagtgatcttcttgcagtggct

SEQ ID NO: 924 - protein, 263 aa, synthetic construct
  REGION 1..263: note = Round 3 (Selectivity)
MVSAHFILIHSICHGAWLWYKLIPLLQSAGHNVTAIDLWASGQNPRGLEQIGTWEQYSEPLFTLIESIPEGKKVILVGESGGGINIALAAEKYPEKVSALVFSNALMPDIDHSPAFVYKKYSEVFTDWKDSIFSNYTYGNDTVTAVELGDRTLAENIFSNSPIEDVELAKHLVRKGSFFEQDLDTLPNFTSEGYGSIRRVYVYGEEDQIFSRDFQLWQINNYKPDKVYCVPGADHKIQISKVNELAQILQEVANSASDLLAVA

SEQ ID NO: 925 - DNA, 789 bp, synthetic construct
  misc_feature 1..789: note = Round 3 (Selectivity)
  source 1..789: mol_type = other DNA
atggttagtgcgcattttattctgatccacagtatttgccatggcgcctggctgtggtacaaactgatcccgttattacagtctgcaggtcataacgttacggcgattgatctttgggctagcgggtcgaaccctcgccagctggaacagattggcacatgggagcagtactcagaaccattgttcaccctgatcgaatcgattccggaaggtaagaaagtcattctggtaggagaatccggtggcggcatcaatattgcactggccgcggagaaatatccggagaaagtgagcgccctcgtctttagtaacgcacttatgcccgatatcgatcacagtccagcgttcgtgtataagaaatatagcgaagttttcactgactggaaagattcgatcttcagcaattatacctacggtaacgacacggttaccgcggtggaattgggagatcgtactctggccgagaacatcttctccaattctccgattgaagatgtagaactggcgaaacatctggtccgcaaaggctccttctttgagcaagacttggataccctgccgaactttacgtcggaagggtatggttcaattcgtcgtgtgtatgtttacggcgaagaagaccagatctttagccgcgattttcagttatggcaaattaataattataagcctgataaagtgtactgtgtaccgagtgctgaccacaagattcagatcagcaaagtcaacgagctggcccagattctccaagaagttgcaaactctgcgagtgatcttcttgcagtggct

SEQ ID NO: 926 - protein, 263 aa, synthetic construct
  REGION 1..263: note = Round 3 (Selectivity)
MVSAHFILIHSICHGAWLWYKLIPLLQSAGHNVTAIDLWASGSNPRQLEQIGTWEQYSEPLFTLIESIPEGKKVILVGESGGGINIALAAEKYPEKVSALVFSNALMPDIDHSPAFVYKKYSEVFTDWKDSIFSNYTYGNDTVTAVELGDRTLAENIFSNSPIEDVELAKHLVRKGSFFEQDLDTLPNFTSEGYGSIRRVYVYGEEDQIFSRDFQLWQINNYKPDKVYCVPSADHKIQISKVNELAQILQEVANSASDLLAVA

SEQ ID NO: 927 - DNA, 789 bp, synthetic construct
  misc_feature 1..789: note = Round 3 (Selectivity)
  source 1..789: mol_type = other DNA
atggttagtgcgcattttattctgatccacagtatttgccatggcgcctggctgtggtacaaactgatcccgttattacagtctgcaggtcataacgttacggcgattgatctttgggctagcgggtcgaaccctcgccagctggaacagattggcacatgggagcagtactcagaaccattgttcaccctgatcgaatcgattccggaaggtaagaaagtcattctggtaggagaatccgggggcggcatcaatattgcactggccgcggagaaatatccggagaaagtgagcgccctcgtctttctgaacgcacttatgcccgatatcgatcacagtccagcgttcgtgtataagaaatatagcgaagttttcactgactggaaagattcgatcttcagcaattatacctacggtaacgacacggttaccgcggtggaattgggagatcgtactctggccgagaacatcttctccaattctccgattgaagatgtagaactggcgaaacatctggtccgcaaaggctccttctttgagcaagacttggataccctgccgaactttacgtcggaagggtatggttcaattcgtcgtgtgtatgtttacggcgaagaagaccagatctttagccgcgattttcagttatggcaaattaataattataagcctgataaagtgtactgtgtaccgagtgctgaccacaagattcagatcagcaaagtcaacgagctggcccagattctccaagaagttgcaaactctgcgagtgatcttcttgcagtggct

SEQ ID NO: 928 - protein, 263 aa, synthetic construct
  REGION 1..263: note = Round 3 (Selectivity)
MVSAHFILIHSICHGAWLWYKLIPLLQSAGHNVTAIDLWASGSNPRQLEQIGTWEQYSEPLFTLIESIPEGKKVILVGESGGGINIALAAEKYPEKVSALVFLNALMPDIDHSPAFVYKKYSEVFTDWKDSIFSNYTYGNDTVTAVELGDRTLAENIFSNSPIEDVELAKHLVRKGSFFEQDLDTLPNFTSEGYGSIRRVYVYGEEDQIFSRDFQLWQINNYKPDKVYCVPSADHKIQISKVNELAQILQEVANSASDLLAVA

SEQ ID NO: 929 - DNA, 789 bp, synthetic construct
  misc_feature 1..789: note = Round 3 (Selectivity)
  source 1..789: mol_type = other DNA
atggttagtgcgcattttattctgatccacagtatttgccatggcgcctggctgtggtacaaactgatcccgttattacagtctgcaggtcataacgttacggcgattgatctttgggctagcgggcaaaaccctcgccagctggaacagattggcacatgggagcagtactcagaaccattgttcaccctgatcgaatcgattccggaaggtaagaaagtcattctggtaggagaatccggtggcggcatcaatattgcactggccgcggagaaatatccggagaaagtgagcgccctcgtctttagtaacgcacttatgcccgatatcgatcacagtccagcgttcgtgtataagaaatatagcgaagttttcactgactggaaagattcgatcttcagcaattatacctacggtaacgacacggttaccgcggtggaattgggagatcgtactctggccgagaacatcttctccaattctccgattgaagatgtagaactggcgaaacatctggtccgcaaaggctccttctttgagcaagacttggataccctgccgaactttacgtcggaagggtatggttcaattcgtcgtgtgtatgtttacggcgaagaagaccagatctttagccgcgattttcagttatggcaaattaataattataagcctgataaagtgtactgtgtaccgagtgctgaccacaagattcagatcagcaaagtcaacgagctggcccagattctccaagaagttgcaaactctgcgagtgatcttcttgcagtggct

SEQ ID NO: 930 - protein, 263 aa, synthetic construct
  REGION 1..263: note = Round 3 (Selectivity)
MVSAHFILIHSICHGAWLWYKLIPLLQSAGHNVTAIDLWASGQNPRQLEQIGTWEQYSEPLFTLIESIPEGKKVILVGESGGGINIALAAEKYPEKVSALVFSNALMPDIDHSPAFVYKKYSEVFTDWKDSIFSNYTYGNDTVTAVELGDRTLAENIFSNSPIEDVELAKHLVRKGSFFEQDLDTLPNFTSEGYGSIRRVYVYGEEDQIFSRDFQLWQINNYKPDKVYCVPSADHKIQISKVNELAQILQEVANSASDLLAVA

SEQ ID NO: 931 - DNA, 789 bp, synthetic construct
  misc_feature 1..789: note = Round 3 (Selectivity)
  source 1..789: mol_type = other DNA
atggttagtgcgcattttattctgatccacagtatttgccatggcgcctggctgtggtacaaactgatcccgttattacagtctgcaggtcataacgttacggcgattgatctttgggctagcgggatgaaccctcgccagctggaacagattggcacatgggagcagtactcagaaccattgttcaccctgatcgaatcgattccggaaggtaagaaagtcattctggtaggagaatccgggggcggcatcaatattgcactggccgcggagaaatatccggagaaagtgagcgccctcgtctttgtgaacgcacttatgcccgatatcgatcacagtccagcgttcgtgtataagaaatatagcgaagttttcactgactggaaagattcgatcttcagcaattatacctacggtaacgacacggttaccgcggtggaattgggagatcgtactctggccgagaacatcttctccaattctccgattgaagatgtagaactggcgaaacatctggtccgcaaaggctccttctttgagcaagacttggataccctgccgaactttacgtcggaagggtatggttcaattcgtcgtgtgtatgtttacggcgaagaagaccagatctttagccgcgattttcagttatggcaaattaataattataagcctgataaagtgtactgtgtaccgagtgctgaccacaagattcagatcagcaaagtcaacgagctggcccagattctccaagaagttgcaaactctgcgagtgatcttcttgcagtggct

SEQ ID NO: 932 - protein, 263 aa, synthetic construct
  REGION 1..263: note = Round 3 (Selectivity)
MVSAHFILIHSICHGAWLWYKLIPLLQSAGHNVTAIDLWASGMNPRQLEQIGTWEQYSEPLFTLIESIPEGKKVILVGESGGGINIALAAEKYPEKVSALVFVNALMPDIDHSPAFVYKKYSEVFTDWKDSIFSNYTYGNDTVTAVELGDRTLAENIFSNSPIEDVELAKHLVRKGSFFEQDLDTLPNFTSEGYGSIRRVYVYGEEDQIFSRDFQLWQINNYKPDKVYCVPSADHKIQISKVNELAQILQEVANSASDLLAVA

SEQ ID NO: 933 - DNA, 789 bp, synthetic construct
  misc_feature 1..789: note = Round 3 (Selectivity)
  source 1..789: mol_type = other DNA
atggttagtgcgcattttattctgatccacagtatttgccatggcgcctggctgtggtacaaactgatcccgttattacagtctgcaggtcataacgttacggcgattgatctttgggctagcgggatgaaccctcgcggcctggaacagattggcacatgggagcagtactcagaaccattgttcaccctgatcgaatcgattccggaaggtaagaaagtcattctggtaggagaatccggtggcggcatcaatattgcactggccgcggagaaatatccggagaaagtgagcgccctcgtctttgtgaacgcacttatgcccgatatcgatcacagtccagcgttcgtgtataagaaatatagcgaagttttcactgactggaaagattcgatcttcagcaattatacctacggtaacgacacggttaccgcggtggaattgggagatcgtactctggccgagaacatcttctccaattctccgattgaagatgtagaactggcgaaacatctggtccgcaaaggctccttctttgagcaagacttggataccctgccgaactttacgtcggaagggtatggttcaattcgtcgtgtgtatgtttacggcgaagaagaccagatctttagccgcgattttcagttatggcaaattaataattataagcctgataaagtgtactgtgtaccgagtgctgaccacaagattcagatcagcaaagtcaacgagctggcccagattctccaagaagttgcaaactctgcgagtgatcttcttgcagtggct

SEQ ID NO: 934 - protein, 263 aa, synthetic construct
  REGION 1..263: note = Round 3 (Selectivity)
MVSAHFILIHSICHGAWLWYKLIPLLQSAGHNVTAIDLWASGMNPRGLEQIGTWEQYSEPLFTLIESIPEGKKVILVGESGGGINIALAAEKYPEKVSALVFVNALMPDIDHSPAFVYKKYSEVFTDWKDSIFSNYTYGNDTVTAVELGDRTLAENIFSNSPIEDVELAKHLVRKGSFFEQDLDTLPNFTSEGYGSIRRVYVYGEEDQIFSRDFQLWQINNYKPDKVYCVPSADHKIQISKVNELAQILQEVANSASDLLAVA

SEQ ID NO: 935 - DNA, 789 bp, synthetic construct
  misc_feature 1..789: note = Round 3 (Selectivity)
  source 1..789: mol_type = other DNA
atggttagtgcgcattttattctgatccacagtatttgccatggcgcctggctgtggtataaactgatcccgttattacagtctgcaggtcataacgttacggcgattgatctttgggctagcgggattaaccctcgccagctggaacagattggcacatgggagcagtactcagaaccattgttcaccctgatcgaatcgattccggaaggtaagaaagtcattctggtaggagaatccggtggcggcatcaatattgcactggccgcggagaaatatccggagaaagtgagcgccctcgtctttgtgaacgcacttatgcccgatatcgatcacagtccagcgttcgtgtataagaaatatagcgaagttttcactgactggaaagattcgatcttcagcaattatacctacggtaacgacacggttaccgcggtggaattgggagatcgtactctggccgagaacatcttctccaattctccgattgaagatgtagaactggcgaaacatctggtccgcaaaggctccttctttgagcaagacttggataccctgccgaactttacgtcggaagggtatggttcaattcgtcgtgtgtatgtttacggcgaagaagaccagatctttagccgcgattttcagttatggcaaattaataattataagcctgataaagtgtactgtgtaccgagtgctgaccacaagattcagatcagcaaagtcaacgagctggcccagattctccaagaagttgcaaactctgcgagtgatcttcttgcagtggct

SEQ ID NO: 936 - protein, 263 aa, synthetic construct; identical to SEQ ID NO: 868
  REGION 1..263: note = Round 3 (Selectivity)

SEQ ID NO: 937 - DNA, 789 bp, synthetic construct
  misc_feature 1..789: note = Round 3 (Selectivity)
  source 1..789: mol_type = other DNA
atggttagtgcgcattttattctgatccacagtatttgccatggcgcctggctgtggtacaaactgatcccgttattacagtctgcaggtcataacgttacggcgattgatctttgggctagcgggatgaaccctcgccagctggaacagattggcacatgggagcagtactcagaaccattgttcaccctgatcgaatcgattccggaaggtaagaaagtcattctggtaggagaatccggtggcggcatcaatattgcactggccgcggagaaatatccggagaaagtgagcgccctcgtctttagtaacgcacttatgcccgatatcgatcacagtccagcgttcgtgtataagaaatatagcgaagttttcactgactggaaagattcgatcttcagcaattatacctacggtaacgacacggttaccgcggtggaattgggagatcgtactctggccgagaacatcttctccaattctccgattgaagatgtagaactggcgaaacatctggtccgcaaaggctccttctttgagcaagacttggataccctgccgaactttacgtcggaagggtatggttcaattcgtcgtgtgtatgtttacggcgaagaagaccagatctttagccgcgattttcagttatggcaaattaataattataagcctgataaagtgtactgtgtaccgagtgctgaccacaagattcagatcagcaaagtcaacgagctggcccagattctccaagaagttgcaaactctgcgagtgatcttcttgcagtggct

SEQ ID NO: 938 - protein, 263 aa, synthetic construct
  REGION 1..263: note = Round 3 (Selectivity)
MVSAHFILIHSICHGAWLWYKLIPLLQSAGHNVTAIDLWASGMNPRQLEQIGTWEQYSEPLFTLIESIPEGKKVILVGESGGGINIALAAEKYPEKVSALVFSNALMPDIDHSPAFVYKKYSEVFTDWKDSIFSNYTYGNDTVTAVELGDRTLAENIFSNSPIEDVELAKHLVRKGSFFEQDLDTLPNFTSEGYGSIRRVYVYGEEDQIFSRDFQLWQINNYKPDKVYCVPSADHKIQISKVNELAQILQEVANSASDLLAVA

SEQ ID NO: 939 - DNA, 789 bp, synthetic construct
  misc_feature 1..789: note = Round 3 (Selectivity)
  source 1..789: mol_type = other DNA
atggttagtgcgcattttattctgatccacagtatttgccatggcgcctggctgtggtacaaactgatcccgttattacagtctgcaggtcataacgttacggcgattgatctttgggctagcgggatgaaccctcgcggcctggaacagattggcacatgggagcagtactcagaaccattgttcaccctgatcgaatcgattccggaaggtaagaaagtcattctggtaggagaatccggtggcggcatcaatattgcactggccgcggagaaatatccggagaaagtgagcgccctcgtctttctgaacgcacttatgcccgatatcgatcacagtccagcgttcgtgtataagaaatatagcgaagttttcactgactggaaagattcgatcttcagcaattatacctacggtaacgacacggttaccgcggtggaattgggagatcgtactctggccgagaacatcttctccaattctccgattgaagatgtagaactggcgaaacatctggtccgcaaaggctccttctttgagcaagacttggataccctgccgaactttacgtcggaagggtatggttcaattcgtcgtgtgtatgtttacggcgaagaagaccagatctttagccgcgattttcagttatggcaaattaataattataagcctgataaagtgtactgtgtaccgagtgctgaccacaagattcagatcagcaaagtcaacgagctggcccagattctccaagaagttgcaaactctgcgagtgatcttcttgcagtggct

SEQ ID NO: 940 - protein, 263 aa, synthetic construct
  REGION 1..263: note = Round 3 (Selectivity)
MVSAHFILIHSICHGAWLWYKLIPLLQSAGHNVTAIDLWASGMNPRGLEQIGTWEQYSEPLFTLIESIPEGKKVILVGESGGGINIALAAEKYPEKVSALVFLNALMPDIDHSPAFVYKKYSEVFTDWKDSIFSNYTYGNDTVTAVELGDRTLAENIFSNSPIEDVELAKHLVRKGSFFEQDLDTLPNFTSEGYGSIRRVYVYGEEDQIFSRDFQLWQINNYKPDKVYCVPSADHKIQISKVNELAQILQEVANSASDLLAVA

SEQ ID NO: 941 - DNA, 789 bp, synthetic construct
  misc_feature 1..789: note = Round 3 (Selectivity)
  source 1..789: mol_type = other DNA
atggttagtgcgcattttattctgatccacagtatttgccatggcgcctggctgtggtacaaactgatcccgttattacagtctgcaggtcataacgttacggcgattgatctttgggctagcgggatcaaccctcgccaactggaacagattggcacatgggagcagtactcagaaccattgttcaccctgatcgaatcgattccggaaggtaagaaagtcattctggtaggagaatccgggggcggcatcaatattgcactggccgcggagaaatatccggagaaagtgagcgccctcgtctttagtaacgcacttatgcccgatatcgatcacagtccagcgttcgtgtataagaaatatagcgaagttttcactgactggaaagattcgatcttcagcaattatacctacggtaacgacacggttaccgcggtggaattgggagatcgtactctggccgagaacatcttctccaattctccgattgaagatgtagaactggcgaaacatctggtccgcaaaggctccttctttgagcaagacttggataccctgccgaactttacgtcggaagggtatggttcaattcgtcgtgtgtatgtttacggcgaagaagaccagatctttagccgcgattttcagttatggcaaattaataattataagcctgataaagtgtactgtgtaccgagtgctgaccacaagattcagatcagcaaagtcaacgagctggcccagattctccaagaagttgcaaactctgcgagtgatcttcttgcagtggct

SEQ ID NO: 942 - protein, 263 aa, synthetic construct; identical to SEQ ID NO: 854
  REGION 1..263: note = Round 3 (Selectivity)

SEQ ID NO: 943 - DNA, 789 bp, synthetic construct
  misc_feature 1..789: note = Round 3 (Selectivity)
  source 1..789: mol_type = other DNA
atggttagtgcgcattttattctgatccacagtatttgccatggcgcctggctgtggtacaaactgatcccgttattacagtctgcaggtcataacgttacggcgattgatctttgggctagcgggtcgaaccctcgccagctggaacagattggcacatgggagcagtactcagaaccattgttcaccctgatcgaatcgattccggaaggtaagaaagtcattctggtaggagaatccgggggcggcatcaatattgcactggccgcggagaaatatccggagaaagtgagcgccctcgtctttagtaacgcacttatgcccgatatcgatcacagtccagcgttcgtgtataagaaatatagcgaagtttttactgactggaaagattcgatcttcagcaattatacctacggtaacgacacggttaccgcggtggaattgggagatcgtactctggccgagaacatcttctccaattctccgattgaagatgtagaactggcgaaacatcgtgtccgcaaaggctccttctttgagcaagacttggataccctgccgaactttacgtcggaagggtatggttcaattcgtcgtgtgtatgtttacggcgaagaagaccagatctttagccgcgattttcagttatggcaaattaataattataagcctgataaagtgtactgtgtaccgagtgctgaccacaagattcagatcagcaaagtcaacgagctggcccagattctccaagaagttgcaaactctgcgagtgatcttcttgcagtggct

SEQ ID NO: 944 - protein, 263 aa, synthetic construct
  REGION 1..263: note = Round 3 (Selectivity)
MVSAHFILIHSICHGAWLWYKLIPLLQSAGHNVTAIDLWASGSNPRQLEQIGTWEQYSEPLFTLIESIPEGKKVILVGESGGGINIALAAEKYPEKVSALVFSNALMPDIDHSPAFVYKKYSEVFTDWKDSIFSNYTYGNDTVTAVELGDRTLAENIFSNSPIEDVELAKHRVRKGSFFEQDLDTLPNFTSEGYGSIRRVYVYGEEDQIFSRDFQLWQINNYKPDKVYCVPSADHKIQISKVNELAQILQEVANSASDLLAVA

SEQ ID NO: 945 - DNA, 789 bp, synthetic construct
  misc_feature 1..789: note = Round 3 (Selectivity)
  source 1..789: mol_type = other DNA
atggttagtgcgcattttattctgatccacagtatttgccatggcgcctggctgtggtacaaactgatcccgttattacagtctgcaggtcataacgttacggcgattgatctttgggctagcgggatcaaccctcgccaactggaacagattggcacatgggagcagtactcagaaccattgttcaccctgatcgaatcgattccggaaggtaagaaagtcattctggtaggagaatccggtggcggcatcaatattgcactggccgcggagaaatatccggagaaagtgagcgccctcgtctttctgaacgcacttatgcccgatatcgatcacagtccagcgttcgtgtataagaaatatagcgaagttttcactgactggaaagattcgatcttcagcaattatacctacggtaacgacacggttaccgcggtggaattgggagatcgtactctggccgagaacatcttctccaattctccgattgaagatgtagaactggcgaaacatctggtccgcaaaggctccttctttgagcaagacttggataccctgccgaactttacgtcggaagggtatggttcaattcgtcgtgtgtatgtttacggcgaagaagaccagatctttagccgcgattttcagttatggcaaattaataattataagcctgataaagtgtactgtgtaccgagtgctgaccacaagattcagatcagcaaagtcaacgagctggcccagattctccaagaagttgcaaactctgcgagtgatcttcttgcagtggct

SEQ ID NO: 946 - protein, 263 aa, synthetic construct; identical to SEQ ID NO: 874
  REGION 1..263: note = Round 3 (Selectivity)

SEQ ID NO: 947 - DNA, 789 bp, synthetic construct
  misc_feature 1..789: note = Round 3 (Selectivity)
  source 1..789: mol_type = other DNA
atggttagtgcgcattttattctgatccacagtatttgccatggcgcctggctgtggtacaaactgatcccgttattacagtctgcaggtcataacgttacggcgattgatctttgggctagcgggattaaccctcgcggcctggaacagattggcacatgggagcagtactcagaaccattgttcaccctgatcgaatcgattccggaaggtaagaaagtcattctggtaggagaatccgggggcggcatcaatattgcactggccgcggagaaatatccggagaaagtgagcgccctcgtctttctgaacgcacttatgcccgatatcgatcacagtccagcgttcgtgtataagaaatatagcgaagttttcactgactggaaagattcgatcttcagcaattatacctacggtaacgacacggttaccgcggtggaattgggagatcgtactctggccgagaacatcttctccaattctccgattgaagatgtagaactggcgaaacatctggtccgcaaaggctccttctttgagcaagacttggataccctgccgaactttacgtcggaagggtatggttcaattcgtcgtgtgtatgtttacggcgaagaagaccagatctttagccgcgattttcagttatggcaaattaataattataagcctgataaagtgtactgtgtaccgagtgctgaccacaagattcagatcagcaaagtcaacgagctggcccagattctccaagaagttgcaaactctgcgagtgatcttcttgcagtggct

SEQ ID NO: 948 - protein, 263 aa, synthetic construct
  REGION 1..263: note = Round 3 (Selectivity)
MVSAHFILIHSICHGAWLWYKLIPLLQSAGHNVTAIDLWASGINPRGLEQIGTWEQYSEPLFTLIESIPEGKKVILVGESGGGINIALAAEKYPEKVSALVFLNALMPDIDHSPAFVYKKYSEVFTDWKDSIFSNYTYGNDTVTAVELGDRTLAENIFSNSPIEDVELAKHLVRKGSFFEQDLDTLPNFTSEGYGSIRRVYVYGEEDQIFSRDFQLWQINNYKPDKVYCVPSADHKIQISKVNELAQILQEVANSASDLLAVA

SEQ ID NO: 949 - DNA, 789 bp, synthetic construct
  misc_feature 1..789: note = Round 3 (Selectivity)
  source 1..789: mol_type = other DNA
atggttagtgcgcattttattctgatccacagtatttgccatggcgcctggctgtggtataaactgatcccgttattacagtctgcaggtcataacgttacggcgattgatctttgggctagcgggatcaaccctcgccaactggaacagattggcacatgggagcagtactcagaaccattgttcaccctgatcgaatcgattccggaaggtaagaaagtcattctggtaggagaatccggtggcggcatcaatattgcactggccgcggagaaatatccggagaaagtgagcgccctcgtctttcacaacgcacttatgcccgatatcgatcacagtccagcgttcgtgtataagaaatatcgtgaagttttcactgactggaaagattcgatcttcagcaattatacctacggtaacgacacggttaccgcggtggaattgggagatcgtactctggccgagaacatcttctccaattctccgattgaagatgtagaactggcgaaacatctggtccgcaaaggctccttctttgagcaagacttggataccctgccgaactttacgtcggaagggtatggttcaattcgtcgtgtgtatgtttacggcgaagaagaccagatctttagccgcgattttcagttatggcaaattaataattataagcctgataaagtgtactgtgtaccgagtgctgaccacaagattcagatcagcaaagtcaacgagctggcccagattctccaagaagttgcaaactctgcgagtgatcttcttgcagtggct

SEQ ID NO: 950 - protein, 263 aa, synthetic construct; identical to SEQ ID NO: 876
  REGION 1..263: note = Round 3 (Selectivity)

SEQ ID NO: 951 - DNA, 789 bp, synthetic construct; identical to SEQ ID NO: 877
  misc_feature 1..789: note = Round 3 (Selectivity)
  source 1..789: mol_type = other DNA

SEQ ID NO: 952 - protein, 263 aa, synthetic construct; identical to SEQ ID NO: 878
  REGION 1..263: note = Round 3 (Selectivity)

SEQ ID NO: 953 - DNA, 789 bp, synthetic construct
  misc_feature 1..789: note = Round 3 (Selectivity)
  source 1..789: mol_type = other DNA
atggttagtgcgcattttattctgatccacagtatttgccatggcgcctggctgtggtataaactgatcccgttattacagtctgcaggtcataacgttacggcgattgatctttgggctagcgggatcaaccctcgccaactggaacagattggcacatgggagcagtactcagaaccattgttcaccctgatcgaatcgattccggaaggtaagaaagtcattctggtaggagaatccggtggcggcatcaatattgcactggccgcggagaaatatccggagaaagtgagcgccctcgtctttcacaacgcacttatgcccgatatcgatcacagtccagcgttcgtgtataagaaatatcttgaagttttcactgactggaaagattcgatcttcagcaattatacctacggtaacgacacggttaccgcggtggaattgggagatcgtactctggccgagaacatcttctccaattctccgattgaagatgtagaactggcgaaacatctggtccgcaaaggctccttctttgagcaagacttggataccctgccgaactttacgtcggaagggtatggttcaattcgtcgtgtgtatgtttacggcgaagaagaccagatctttagccgcgattttcagttatggcaaattaataattataagcctgataaagtgtactgtgtaccgagtgctgaccacaagattcagatcagcaaagtcaacgagctggcccagattctccaagaagttgcaaactctgcgagtgatcttcttgcagtggct

SEQ ID NO: 954 - protein, 263 aa, synthetic construct; identical to SEQ ID NO: 892
  REGION 1..263: note = Round 3 (Selectivity)

SEQ ID NO: 955 - DNA, 789 bp, synthetic construct
  misc_feature 1..789: note = Round 3 (Selectivity)
  source 1..789: mol_type = other DNA
atggttagtgcgcattttattctgatccacagtatttgccatggcgcctggctgtggtataaactgatcccgttattacagtctgcaggtcataacgttacggcgattgatctttgggctagcgggatcaaccctcgccaactggaacagattggcacatgggagcagtactcagaaccattgttcaccctgatcgaatcgattccggaaggtaagaaagtcattctggtaggagaatccggtggcggcatcaatattgcactggccgcggagaaatatccggagaaagtgagcgccctcgtctttcacaacgcacttatgcccgatatcgatcacagtccagcgttcgtgtataagaaatatcatgaagttttcactgactggaaagattcgatcttcagcaattatacctacggtaacgacacggttaccgcggtggaattgggagatcgtactctggccgagaacatcttctccaattctccgattgaagatgtagaactggcgaaacatctggtccgcaaaggctccttctttgagcaagacttggataccctgccgaactttacgtcggaagggtatggttcaattcgtcgtgtgtatgtttacggcgaagaagaccagatctttagccgcgattttcagttatggcaaattaataattataagcctgataaagtgtactgtgtaccgagtgctgaccacaagattcagatcagcaaagtcaacgagctggcccagattctccaagaagttgcaaactctgcgagtgatcttcttgcagtggct

SEQ ID NO: 956 - protein, 263 aa, synthetic construct
  REGION 1..263: note = Round 3 (Selectivity)
MVSAHFILIHSICHGAWLWYKLIPLLQSAGHNVTAIDLWASGINPRQLEQIGTWEQYSEPLFTLIESIPEGKKVILVGESGGGINIALAAEKYPEKVSALVFHNALMPDIDHSPAFVYKKYHEVFTDWKDSIFSNYTYGNDTVTAVELGDRTLAENIFSNSPIEDVELAKHLVRKGSFFEQDLDTLPNFTSEGYGSIRRVYVYGEEDQIFSRDFQLWQINNYKPDKVYCVPSADHKIQISKVNELAQILQEVANSASDLLAVA

SEQ ID NO: 957 - DNA, 789 bp, synthetic construct
  misc_feature 1..789: note = Round 3 (Selectivity)
  source 1..789: mol_type = other DNA
atggttagtgcgcattttattctgatccacagtatttgccatggcgcctggctgtggtataaactgatcccgttattacagtctgcaggtcataacgttacggcgattgatctttgggctagcgggatcaaccctcgccaactggaacagattggcacatgggagcagtactcagaaccattgttcaccctgatcgaatcgattccggaaggtaagaaagtcattctggtaggagaatccggtggcggcatcaatattgcactggccgcggagaaatatccggagaaagtgagcgccctcgtctttcacaacgcacttatgcccgatatcgatcacagtccagcgttcgtgtataagaaatatgtggaagttttcactgactggaaagattcgatcttcagcaattatacctacggtaacgacacggttaccgcggtggaattgggagatcgtactctggccgagaacatcttctccaattctccgattgaagatgtagaactggcgaaacatctggtccgcaaaggctccttctttgagcaagacttggataccctgccgaactttacgtcggaagggtatggttcaattcgtcgtgtgtatgtttacggcgaagaagaccagatctttagccgcgattttcagttatggcaaattaataattataagcctgataaagtgtactgtgtaccgagtgctgaccacaagattcagatcagcaaagtcaacgagctggcccagattctccaagaagttgcaaactctgcgagtgatcttcttgcagtggct

SEQ ID NO: 958 - protein, 263 aa, synthetic construct; identical to SEQ ID NO: 888
  REGION 1..263: note = Round 3 (Selectivity)

SEQ ID NO: 959 - DNA, 789 bp, synthetic construct; identical to SEQ ID NO: 885
  misc_feature 1..789: note = Round 3 (Selectivity)
  source 1..789: mol_type = other DNA

SEQ ID NO: 960 - protein, 263 aa, synthetic construct; identical to SEQ ID NO: 886
  REGION 1..263: note = Round 3 (Selectivity)

SEQ ID NO: 961 - DNA, 789 bp, synthetic construct; identical to SEQ ID NO: 889
  misc_feature 1..789: note = Round 3 (Selectivity)
  source 1..789: mol_type = other DNA

SEQ ID NO: 962 - protein, 263 aa, synthetic construct; identical to SEQ ID NO: 890
  REGION 1..263: note = Round 3 (Selectivity)

SEQ ID NO: 963 - DNA, 789 bp, synthetic construct
  misc_feature 1..789: note = Round 3 (Selectivity)
  source 1..789: mol_type = other DNA
atggttagtgcgcattttattctgatccacagtgtttgccatggcgcctggctgtggtataaactgatcccgttattacagtctgcaggtcataacgttacggcgattgatctttgggctagcgggatcaaccctcgccaactggaacagattggcacatgggagcagtactcagaaccattgttcaccctgatcgaatcgattccggaaggtaagaaagtcattctggtaggagaatccggtggcggcatcaatattgcactggccgcggagaaatatccggagaaagtgagcgccctcgtctttcacaacgcacttatgcccgatatcgatcacagtccagcgttcgtgtataagaaatatagcgaagttttcactgactggaaagattcgatcttcagcaattatacctacggtaacgacacggttaccgcggtggaattgggagatcgtactctggccgagaacatcttctccaattctccgattgaagatgtagaactggcgaaacatctggtccgcaaaggctccttctttgagcaagacttggataccctgccgaactttacgtcggaagggtatggttcaattcgtcgtgtgtatgtttacggcgaagaagaccagatctttagccgcgattttcagttatggcaaattaataattataagcctgataaagtgtactgtgtaccgagtgctgaccacaagattcagatcagcaaagtcaacgagctggcccagattctccaagaagttgcaaactctgcgagtgatcttcttgcagtggct

SEQ ID NO: 964 - protein, 263 aa, synthetic construct
  REGION 1..263: note = Round 3 (Selectivity)
MVSAHFILIHSVCHGAWLWYKLIPLLQSAGHNVTAIDLWASGINPRQLEQIGTWEQYSEPLFTLIESIPEGKKVILVGESGGGINIALAAEKYPEKVSALVFHNALMPDIDHSPAFVYKKYSEVFTDWKDSIFSNYTYGNDTVTAVELGDRTLAENIFSNSPIEDVELAKHLVRKGSFFEQDLDTLPNFTSEGYGSIRRVYVYGEEDQIFSRDFQLWQINNYKPDKVYCVPSADHKIQISKVNELAQILQEVANSASDLLAVA

SEQ ID NO: 965 - DNA, 789 bp, synthetic construct
  misc_feature 1..789: note = Round 3 (Selectivity)
  source 1..789: mol_type = other DNA
atggttagtgcgcattttattctgatccacagtatttgccatggcgcctggctgtggtataaactgatcccgttattacagtctgcaggtcataacgttacggcgattgatctttgggctagcgggatcaaccctcgccaactggaacagattggcacatgggagcagtactcagaaccattgttcaccctgatcgaatcgattccggaaggtaagaaagtcattctggtaggagaatccggtggcggcatcaatattgcactggccgcggagaaatatccggagaaagtgagcgccctcgtctttcacaacgcacttatgcccgatatcgatcacagtccagcgttcgtgtataagaaatataatgaagttttcactgactggaaagattcgatcttcagcaattatacctacggtaacgacacggttaccgcggtggaattgggagatcgtactctggccgagaacatcttctccaattctccgattgaagatgtagaactggcgaaacatctggtccgcaaaggctccttctttgagcaagacttggataccctgccgaactttacgtcggaagggtatggttcaattcgtcgtgtgtatgtttacggcgaagaagaccagatctttagccgcgattttcagttatggcaaattaataattataagcctgataaagtgtactgtgtaccgagtgctgaccacaagattcagatcagcaaagtcaacgagctggcccagattctccaagaagttgcaaactctgcgagtgatcttcttgcagtggct

SEQ ID NO: 966 - protein, 263 aa, synthetic construct
  REGION 1..263: note = Round 3 (Selectivity)
MVSAHFILIHSICHGAWLWYKLIPLLQSAGHNVTAIDLWASGINPRQLEQIGTWEQYSEPLFTLIESIPEGKKVILVGESGGGINIALAAEKYPEKVSALVFHNALMPDIDHSPAFVYKKYNEVFTDWKDSIFSNYTYGNDTVTAVELGDRTLAENIFSNSPIEDVELAKHLVRKGSFFEQDLDTLPNFTSEGYGSIRRVYVYGEEDQIFSRDFQLWQINNYKPDKVYCVPSADHKIQISKVNELAQILQEVANSASDLLAVA

SEQ ID NO: 967 - DNA, 789 bp, synthetic construct
  misc_feature 1..789: note = Round 3 (Selectivity)
  source 1..789: mol_type = other DNA
atggttagtgcgcattttattctgatccacagtatttgccatggcgcctggctgtggtataaactgatcccgttattacagtctgcaggtcataacgttacggcgattgatctttgggctagcgggatcaaccctcgccaactggaacagattggcacatgggagcagtactcagaaccattgttcaccctgatcgaatcgattccggaaggtaagaaagtcattctggtaggagaatccggtggcggcatcaatattgcactggccgcggagaaatatccggagaaagtgagcgccctcgtctttcacaacgcacttatgcccgatatcgatcacagtccagcgttcgtgtataagaaatatagcgaagttttcactgactggaaagattcgatcttcagcaattatacctacggtaacgacacggttaccgcggtggaattgggagatcgtactctggccgagaacatcttctccaattctccgattgaagatgtagaactggcgaaacatctggtccgcaaaggctccttctttctgcaagacttggataccctgccgaactttacgtcggaagggtatggttcaattcgtcgtgtgtatgtttacggcgaagaagaccagatctttagccgcgattttcagttatggcaaattaataattataagcctgataaagtgtactgtgtaccgagtgctgaccacaagattcagatcagcaaagtcaacgagctggcccagattctccaagaagttgcaaactctgcgagtgatcttcttgcagtggct

SEQ ID NO: 968 - protein, 263 aa, synthetic construct
  REGION 1..263: note = Round 3 (Selectivity)
MVSAHFILIHSICHGAWLWYKLIPLLQSAGHNVTAIDLWASGINPRQLEQIGTWEQYSEPLFTLIESIPEGKKVILVGESGGGINIALAAEKYPEKVSALVFHNALMPDIDHSPAFVYKKYSEVFTDWKDSIFSNYTYGNDTVTAVELGDRTLAENIFSNSPIEDVELAKHLVRKGSFFLQDLDTLPNFTSEGYGSIRRVYVYGEEDQIFSRDFQLWQINNYKPDKVYCVPSADHKIQISKVNELAQILQEVANSASDLLAVA

SEQ ID NO: 969 - DNA, 789 bp, synthetic construct
  misc_feature 1..789: note = Round 3 (Selectivity)
  source 1..789: mol_type = other DNA
atggttagtgcgcattttattctgatccacagtatttgccatggcgcctggctgtggtataaactgatcccgttattacagtctgcaggtcataacgttacggcgattgatctttgggctagcgggatcaaccctcgccaactggaacagattggcacatgggagcagtactcagaaccattgttcaccctgatcgaatcgattccggaaggtaagaaagtcattctggtaggagaatccggtggcggcatcaatattgcactggccgcggagaaatatccggagaaagtgagcgccctcgtctttcacaacgcacttatgcccgatatcgatcacagtccagcgttcgtgtataagaaatatagcgaagttttcactgactggaaagattcgatcttcagcaattatacctacggtaacgacacggttaccgcggtggaattgggagatcgtactctggccgagaacatcttctccaattctccgattgaagatgtagaactggcgaaacatctggtccgcaaaggctccttctttgttcaagacttggataccctgccgaactttacgtcggaagggtatggttcaattcgtcgtgtgtatgtttacggcgaagaagaccagatctttagccgcgattttcagttatggcaaattaataattataagcctgataaagtgtactgtgtaccgagtgctgaccacaagattcagatcagcaaagtcaacgagctggcccagattctccaagaagttgcaaactctgcgagtgatcttcttgcagtggct

SEQ ID NO: 970 - protein, 263 aa, synthetic construct
  REGION 1..263: note = Round 3 (Selectivity)
MVSAHFILIHSICHGAWLWYKLIPLLQSAGHNVTAIDLWASGINPRQLEQIGTWEQYSEPLFTLIESIPEGKKVILVGESGGGINIALAAEKYPEKVSALVFHNALMPDIDHSPAFVYKKYSEVFTDWKDSIFSNYTYGNDTVTAVELGDRTLAENIFSNSPIEDVELAKHLVRKGSFFVQDLDTLPNFTSEGYGSIRRVYVYGEEDQIFSRDFQLWQINNYKPDKVYCVPSADHKIQISKVNELAQILQEVANSASDLLAVA

SEQ ID NO: 971 - DNA, 789 bp, synthetic construct
  misc_feature 1..789: note = Round 3 (Selectivity)
  source 1..789: mol_type = other DNA
atggttagtgcgcattttattctgatccacagtatttgccatggcgcctggctgtggtataaactgatcccgttattacagtctgcaggtcataacgttacggcgattgatctttgggctagcgggatcaaccctcgccaactggaacagattggcacatgggagcagtactcagaaccattgttcaccctgatcgaatcgattccggaaggtaagaaagtcattctggtaggagaatccggtggcggcatcaatattgcactggccgcggagaaatatccggagaaagtgagcgccctcgtctttcacaacgcacttatgcccgatatcgatcacagtccagcgttcgtgtataagaaatatagcgaagttttcactgactggaaagattcgatcttcagcaattatacctacggtaacgacacggttaccgcggtggaattgggagatcgtactctggccgagaacatcttctccaattctccgattgaagatgtagaactggcgaaacatctggtccgcaaaggctccttctttgagcaagacttggataccctgccgaactttacgtcggaagggtatggttcaattcgtcgtgtgtatgtttacggcgaagaagaccagatctttagccgcgattttcagttatggcaaattaatgggtataagcctgataaagtgtactgtgtaccgagtgctgaccacaagattcagatcagcaaagtcaacgagctggcccagattctccaagaagttgcaaactctgcgagtgatcttcttgcagtggct

SEQ ID NO: 972 - protein, 263 aa, synthetic construct
  REGION 1..263: note = Round 3 (Selectivity)
MVSAHFILIHSICHGAWLWYKLIPLLQSAGHNVTAIDLWASGINPRQLEQIGTWEQYSEPLFTLIESIPEGKKVILVGESGGGINIALAAEKYPEKVSALVFHNALMPDIDHSPAFVYKKYSEVFTDWKDSIFSNYTYGNDTVTAVELGDRTLAENIFSNSPIEDVELAKHLVRKGSFFEQDLDTLPNFTSEGYGSIRRVYVYGEEDQIFSRDFQLWQINGYKPDKVYCVPSADHKIQISKVNELAQILQEVANSASDLLAVA

SEQ ID NO: 973 - DNA, 789 bp, synthetic construct
  misc_feature 1..789: note = Round 3 (Selectivity)
  source 1..789: mol_type = other DNA
atggttagtgcgcattttattctgatccacagtatttgccatggcgcctggctgtggtataaactgatcccgttattacagtctgcaggtcataacgttacggcgattgatctttgggctagcgggatcaaccctcgccaactggaacagattggcacatgggagcagtactcagaaccattgttcaccctgatcgaatcgattccggaaggtaagaaagtcattctggtaggagaatccggtggcggcatcaatattgcactggccgcggagaaatatccggagaaagtgagcgccctcgtctttcacaacgcacttatgcccgatatcgatcacagtccagcgttcgtgtataagaaatatagcgaagttttcactgactggaaagattatatcttcagcaattatacctacggtaacgacacggttaccgcggtggaattgggagatcgtactctggccgagaacatcttctccaattctccgattgaagatgtagaactggcgaaacatctggtccgcaaaggctccttctttgagcaagacttggataccctgccgaactttacgtcggaagggtatggttcaattcgtcgtgtgtatgtttacggcgaagaagaccagatctttagccgcgattttcagttatggcaaattaataattataagcctgataaagtgtactgtgtaccgagtgctgaccacaagattcagatcagcaaagtcaacgagctggcccagattctccaagaagttgcaaactctgcgagtgatcttcttgcagtggct

SEQ ID NO: 974 - protein, 263 aa, synthetic construct
  REGION 1..263: note = Round 3 (Selectivity)
MVSAHFILIHSICHGAWLWYKLIPLLQSAGHNVTAIDLWASGINPRQLEQIGTWEQYSEPLFTLIESIPEGKKVILVGESGGGINIALAAEKYPEKVSALVFHNALMPDIDHSPAFVYKKYSEVFTDWKDYIFSNYTYGNDTVTAVELGDRTLAENIFSNSPIEDVELAKHLVRKGSFFEQDLDTLPNFTSEGYGSIRRVYVYGEEDQIFSRDFQLWQINNYKPDKVYCVPSADHKIQISKVNELAQILQEVANSASDLLAVA

SEQ ID NO: 975 - DNA, 789 bp, synthetic construct
  misc_feature 1..789: note = Round 3 (Selectivity)
  source 1..789: mol_type = other DNA
atggttagtgcgcattttattctgatccacagtatttgccatggcgcctggctgtggtataaactgatcccgttattacagtctgcaggtcataacgttacggcgattgatctttgggctagcgggatcaaccctcgccaactggaacagattggcacatgggagcagtactcagaaccattgttccctctgatcgaatcgattccggaaggtaagaaagtcattctggtaggagaatccggtggcggcatcaatattgcactggccgcggagaaatatccggagaaagtgagcgccctcgtctttcacaacgcacttatgcccgatatcgatcacagtccagcgttcgtgtataagaaatatagcgaagttttcactgactggaaagattcgatcttcagcaattatacctacggtaacgacacggttaccgcggtggaattgggagatcgtactctggccgagaacatcttctccaattctccgattgaagatgtagaactggcgaaacatctggtccgcaaaggctccttctttgagcaagacttggataccctgccgaactttacgtcggaagggtatggttcaattcgtcgtgtgtatgtttacggcgaagaagaccagatctttagccgcgattttcagttatggcaaattaataattataagcctgataaagtgtactgtgtaccgagtgctgaccacaagattcagatcagcaaagtcaacgagctggcccagattctccaagaagttgcaaactctgcgagtgatcttcttgcagtggct

SEQ ID NO: 976 - protein, 263 aa, synthetic construct
  REGION 1..263: note = Round 3 (Selectivity)
MVSAHFILIHSICHGAWLWYKLIPLLQSAGHNVTAIDLWASGINPRQLEQIGTWEQYSEPLFPLIESIPEGKKVILVGESGGGINIALAAEKYPEKVSALVFHNALMPDIDHSPAFVYKKYSEVFTDWKDSIFSNYTYGNDTVTAVELGDRTLAENIFSNSPIEDVELAKHLVRKGSFFEQDLDTLPNFTSEGYGSIRRVYVYGEEDQIFSRDFQLWQINNYKPDKVYCVPSADHKIQISKVNELAQILQEVANSASDLLAVA

SEQ ID NO: 977 - DNA, 789 bp, synthetic construct
  misc_feature 1..789: note = Round 3 (Selectivity)
  source 1..789: mol_type = other DNA
atggttagtgcgcattttattctgatccacagtatttgccatggcgcctggctgtggtataaactgatcccgttattacagtctgcaggtcataacgttacggcgattgatctttgggctagcgggatcaaccctcgccaactggaacagattggcacatgggagcagtactcagaaccattgttcaccctgatcgaatcgattccggaaggtaagaaagtcattctggtaggagaatccggtggcggcatcaatattgcactggccgcggagaaatatccggagaaagtgagcgccctcgtctttcacaacgcacttatgcccgatatcgatcacagtccagcgttcgtgtataagaaatatagcgaagttttcactgactggaaagattcgatcttcagcaattatacctacggtaacgacacggttaccgcggtggaattgggagatcgtactctggccgagaacatcttctccaattctccgattgaagatgtagaactggcgaaacatctggtccgcaaaggctccgcttttgagcaagacttggataccctgccgaactttacgtcggaagggtatggttcaattcgtcgtgtgtatgtttacggcgaagaagaccagatctttagccgcgattttcagttatggcaaattaataattataagcctgataaagtgtactgtgtaccgagtgctgaccacaagattcagatcagcaaagtcaacgagctggcccagattctccaagaagttgcaaactctgcgagtgatcttcttgcagtggct

SEQ ID NO: 978 - protein, 263 aa, synthetic construct
  REGION 1..263: note = Round 3 (Selectivity)
MVSAHFILIHSICHGAWLWYKLIPLLQSAGHNVTAIDLWASGINPRQLEQIGTWEQYSEPLFTLIESIPEGKKVILVGESGGGINIALAAEKYPEKVSALVFHNALMPDIDHSPAFVYKKYSEVFTDWKDSIFSNYTYGNDTVTAVELGDRTLAENIFSNSPIEDVELAKHLVRKGSAFEQDLDTLPNFTSEGYGSIRRVYVYGEEDQIFSRDFQLWQINNYKPDKVYCVPSADHKIQISKVNELAQILQEVANSASDLLAVA

SEQ ID NO: 979 - DNA, 789 bp, synthetic construct
  misc_feature 1..789: note = Round 3 (Selectivity)
  source 1..789: mol_type = other DNA
atggttagtgcgcattttattctgatccacagtatttgccatggcgcctggctgtggtataaactgatcccgttattacagtctgcaggtcataacgttacggcgattgatctttgggctagcgggatcaaccctcgccaactggaacagattggcacatgggagcagtactcagaaccattgttcaccctgatcgaatcgattccggaaggtaagaaagtcattctggtaggagaatccggtggcggcatcaatattgcactggccgcggagaaatatccggagaaagtgagcgccctcgtctttcacaacgcacttatgcccgatatcgatcacagtccagcgttcgtgtataagaaatatagcgaagttttcactgactggaaagattcgatcttcagcaattatacctacggtaacgacacggttaccgcgattgaattgggagatcgtactctggccgagaacatcttctccaattctccgattgaagatgtagaactggcgaaacatctggtccgcaaaggctccttctttgagcaagacttggataccctgccgaactttacgtcggaagggtatggttcaattcgtcgtgtgtatgtttacggcgaagaagaccagatctttagccgcgattttcagttatggcaaattaataattataagcctgataaagtgtactgtgtaccgagtgctgaccacaagattcagatcagcaaagtcaacgagctggcccagattctccaagaagttgcaaactctgcgagtgatcttcttgcagtggct

SEQ ID NO: 980 - protein, 263 aa, synthetic construct
  REGION 1..263: note = Round 3 (Selectivity)
MVSAHFILIHSICHGAWLWYKLIPLLQSAGHNVTAIDLWASGINPRQLEQIGTWEQYSEPLFTLIESIPEGKKVILVGESGGGINIALAAEKYPEKVSALVFHNALMPDIDHSPAFVYKKYSEVFTDWKDSIFSNYTYGNDTVTAIELGDRTLAENIFSNSPIEDVELAKHLVRKGSFFEQDLDTLPNFTSEGYGSIRRVYVYGEEDQIFSRDFQLWQINNYKPDKVYCVPSADHKIQISKVNELAQILQEVANSASDLLAVA

SEQ ID NO: 981 - DNA, 789 bp, synthetic construct
  misc_feature 1..789: note = Round 4 (Activity)
  source 1..789: mol_type = other DNA
atggttagtgcgcattttattctgatccacagtatttgccatggcgcctggctgtggtataaactgatcccgttattacagtctgcaggtcataacgttacggcgattgatctttgggctagcgggagtaatcctcgccaactggaacagattggcacatgggagcagtactcagaaccattgttcaccctgatcgaatcgattccggaaggtaagaaagtcattctggtaggagaatccggtggcggcatcaatattgcactggccgcggagaaatatccggagaaagtgagcgccctcgtctttaccaacgcacttatgcccgatatcgatcacagtccagcgttcgtgtataagaaatatagcgaagttttcactgactggaaagattcgatcttcagcaattatacctacggtaacgacacggttaccgcggtggaattgggagatcgtactctggccgagaacatcttctccaattctccgattgaagatgtagaactggcgaaacatcgtgtccgcaaaggctccttctttgagcaagacttggataccctgccgaactttacgtcggaagggtatggttcaattcgtcgtgtgtatgtttacggcgaagaagaccagatctttagccgcgattttcagttatggcaaattaataattataagcctgataaagtgtactgtgtaccgagtgctgaccacaagattatgatcagcaaggtcaacgagctggcccagattctccaagaagttgcaaactctgcgagtgatcttcttgcagtggct

SEQ ID NO: 982 - protein, 263 aa, synthetic construct
  REGION 1..263: note = Round 4 (Activity)
MVSAHFILIHSICHGAWLWYKLIPLLQSAGHNVTAIDLWASGSNPRQLEQIGTWEQYSEPLFTLIESIPEGKKVILVGESGGGINIALAAEKYPEKVSALVFTNALMPDIDHSPAFVYKKYSEVFTDWKDSIFSNYTYGNDTVTAVELGDRTLAENIFSNSPIEDVELAKHRVRKGSFFEQDLDTLPNFTSEGYGSIRRVYVYGEEDQIFSRDFQLWQINNYKPDKVYCVPSADHKIMISKVNELAQILQEVANSASDLLAVA

SEQ ID NO: 983 - DNA, 789 bp, synthetic construct
  misc_feature 1..789: note = Round 4 (Selectivity)
  source 1..789: mol_type = other DNA
atggttagtgcgcattttattctgatccacagtatttgccatggcgcctggctgtggtataaactgatcccgttattacagtctgcaggtcataacgttacggcgattgatctttgggctagcgggatgaatcctcgccaactggaacagattggcacatgggagcagtactcagaaccattgttcaccctgatcgaatcgattccggaaggtaagaaagtcattctggtaggagaatccgggggcggcatcaatattgcactggccgcggagaaatatccggagaaagtgagcgccctcgtctttgtgaacgcacttatgcccgatatcgatcacagtccagcgttcgtgtataagaaatatagcgaagttttcactgactggaaagattcgatcttcagcaattatacctacggtaacgacacggttaccgcgattgaattgggagatcgtactctggccgagaacatcttctccaattctccgattgaagatgtagaactggcgaaacatcgtgtccgcaaaggctccttttttgtgcaagacttggataccctgccgaactttacgtcggaagggtatggttcaattcgtcgtgtgtatgtttacggcgaagaagaccagatctttagccgcgattttcagttatggcaaattaataattataagcctgataaagtgtactgtgtaccgagtgctgaccacaagattatgatcagcaaagtcaacgagctggcccagattctccaagaagttgcaaactctgcgagtgatcttcttgcagtggct

SEQ ID NO: 984 - protein, 263 aa, synthetic construct
  REGION 1..263: note = Round 4 (Selectivity)
MVSAHFILIHSICHGAWLWYKLIPLLQSAGHNVTAIDLWASGMNPRQLEQIGTWEQYSEPLFTLIESIPEGKKVILVGESGGGINIALAAEKYPEKVSALVFVNALMPDIDHSPAFVYKKYSEVFTDWKDSIFSNYTYGNDTVTAIELGDRTLAENIFSNSPIEDVELAKHRVRKGSFFVQDLDTLPNFTSEGYGSIRRVYVYGEEDQIFSRDFQLWQINNYKPDKVYCVPSADHKIMISKVNELAQILQEVANSASDLLAVA

SEQ ID NO: 985 - DNA, 789 bp, synthetic construct
  misc_feature 1..789: note = Round 4 (Selectivity)
  source 1..789: mol_type = other DNA
atggttagtgcgcattttattctgatccacagtatttgccatggcgcctggctgtggtataaactgatcccgttattacagtctgcaggtcataacgttacggcgattgatctttgggctagcgggtcgaatcctcgccaactggaacagattggcacatgggagcagtactcagaaccattgttcacgctgatcgaatcgattccggaaggtaagaaagtcattctggtaggagaatccgggggcggcatcaatattgcactggccgcggagaaatatccggagaaagtgagcgccctcgtctttgtgaacgcacttatgcccgatatcgatcacagtccagcgttcgtgtataagaaatatagcgaagttttcactgactggaaagattcgatcttcagcaattatacctacggtaacgacacggttaccgcgattgaattgggagatcgtactctggccgagaacatcttctccaattctccgattgaagatgtagaactggcgaaacatcgtgtccgcaaaggctccttttttctgcaagacttggataccctgccgaactttacgtcggaagggtatggttcaattcgtcgtgtgtatgtttacggcgaagaagaccagatctttagccgcgattttcagttatggcaaattaataattataagcctgataaagtgtactgtgtaccgagtgctgaccacaagattatgatcagccgcgtcaacgagctggcccagattctccaagaagttgcaaactctgcgagtgatcttcttgcagtggct

SEQ ID NO: 986 - protein, 263 aa, synthetic construct
  REGION 1..263: note = Round 4 (Selectivity)
MVSAHFILIHSICHGAWLWYKLIPLLQSAGHNVTAIDLWASGSNPRQLEQIGTWEQYSEPLFTLIESIPEGKKVILVGESGGGINIALAAEKYPEKVSALVFVNALMPDIDHSPAFVYKKYSEVFTDWKDSIFSNYTYGNDTVTAIELGDRTLAENIFSNSPIEDVELAKHRVRKGSFFLQDLDTLPNFTSEGYGSIRRVYVYGEEDQIFSRDFQLWQINNYKPDKVYCVPSADHKIMISRVNELAQILQEVANSASDLLAVA

SEQ ID NO: 987 - DNA, 789 bp, synthetic construct
  misc_feature 1..789: note = Round 4 (Selectivity)
  source 1..789: mol_type = other DNA
atggttagtgcgcattttattctgatccacagtgtttgccatggcgcctggctgtggtataaactgatcccgttattacagtctgcaggtcataacgttacggcgattgatctttgggctagcgggatgaatcctcgccaactggaacagattggcacatgggagcagtactcagaaccattgttcccgctgatcgaatcgattccggaaggtaagaaagtcattctggtaggagaatccgggggcggcatcaatattgcactggccgcggagaaatatccggagaaagtgagcgccctcgtctttctgaacgcacttatgcccgatatcgatcacagtccagcgttcgtgtataagaaatatagcgaagttttcactgactggaaagattcgatcttcagcaattatacctacggtaacgacacggttaccgcgattgaattgggagatcgtactctggccgagaacatcttctccaattctccgattgaagatgtagaactggcgaaacatcgtgtccgcaaaggctccttttttctgcaagacttggataccctgccgaactttacgtcggaagggtatggttcaattcgtcgtgtgtatgtttacggcgaagaagaccagatctttagccgcgattttcagttatggcaaattaataattataagcctgataaagtgtactgtgtaccgggggctgaccacaagattatgatcagccgcgtcaacgagctggcccagattctccaagaagttgcaaactctgcgagtgatcttcttgcagtggct

SEQ ID NO: 988 - protein, 263 aa, synthetic construct
  REGION 1..263: note = Round 4 (Selectivity)
MVSAHFILIHSVCHGAWLWYKLIPLLQSAGHNVTAIDLWASGMNPRQLEQIGTWEQYSEPLFPLIESIPEGKKVILVGESGGGINIALAAEKYPEKVSALVFLNALMPDIDHSPAFVYKKYSEVFTDWKDSIFSNYTYGNDTVTAIELGDRTLAENIFSNSPIEDVELAKHRVRKGSFFLQDLDTLPNFTSEGYGSIRRVYVYGEEDQIFSRDFQLWQINNYKPDKVYCVPGADHKIMISRVNELAQILQEVANSASDLLAVA

SEQ ID NO: 989 - DNA, 789 bp, synthetic construct
  misc_feature 1..789: note = Round 4 (Activity)
  source 1..789: mol_type = other DNA
atggttagtgcgcattttattctgatccacagtgtttgccatggcgcctggctgtggtataaactgatcccgttattacagtctgcaggtcataacgttacggcgattgatctttgggctagcgggatgaatcctcgccaactggaacagattggcacatgggagcagtactcagaaccattgttcaccctgatcgaatcgattccggaaggtaagaaagtcattctggtaggagaatcctttggcggcatcaatattgcactggccgcggagaaatatccggagaaagtgagcgccctcgtctttctgaacgcacttatgcccgatatcgatcacagtccagcgttcgtgtataagaaatatagcgaagttttcactgactggaaagattcgatcttcagcaattatacctacggtaacgacacggttaccgcggtggaattgggagatcgtactctggccgagaacatcttctccaattctccgattgaagatgtagaactggcgaaacatcgtgtccgcaaaggctccttttttgagcaagacttggataccctgccgaactttacgtcggaagggtatggttcaattcgtcgtgtgtatgtttacggcgaagaagaccagatctttagccgcgattttcagttatggcaaattaataattataagcctgataaagtgtactgtgtaccgagtgctgaccacaagattatgatcagccgcgtcaacgagctggcccagattctccaagaagttgcaaactctgcgagtgatcttcttgcagtggct

SEQ ID NO: 990 - protein, 263 aa, synthetic construct
  REGION 1..263: note = Round 4 (Activity)
MVSAHFILIHSVCHGAWLWYKLIPLLQSAGHNVTAIDLWASGMNPRQLEQIGTWEQYSEPLFTLIESIPEGKKVILVGESFGGINIALAAEKYPEKVSALVFLNALMPDIDHSPAFVYKKYSEVFTDWKDSIFSNYTYGNDTVTAVELGDRTLAENIFSNSPIEDVELAKHRVRKGSFFEQDLDTLPNFTSEGYGSIRRVYVYGEEDQIFSRDFQLWQINNYKPDKVYCVPSADHKIMISRVNELAQILQEVANSASDLLAVA

SEQ ID NO: 991 - DNA, 789 bp, synthetic construct
  misc_feature 1..789: note = Round 4 (Selectivity)
  source 1..789: mol_type = other DNA
atggttagtgcgcattttattctgatccacagtatttgccatggcgcctggctgtggtataaactgatcccgttattacagtctgcaggtcataacgttacggcgattgatctttgggctagcgggcagaatcctcgccaactggaacagattggcacatgggagcagtactcagaaccattgttcaccctgatcgaatcgattccggaaggtaagaaagtcattctggtaggagaatccgggggcggcatcaatattgcactggccgcggagaaatatccggagaaagtgagcgccctcgtctttgtgaacgcacttatgcccgatatcgatcacagtccagcgttcgtgtataagaaatatagcgaagttttcactgactggaaagattcgatcttcagcaattatacctacggtaacgacacggttaccgcgattgaattgggagatcgtactctggccgagaacatcttctccaattctccgattgaagatgtagaactggcgaaacatcgtgtccgcaaaggctccttttttctgcaagacttggataccctgccgaactttacgtcggaagggtatggttcaattcgtcgtgtgtatgtttacggcgaagaagaccagatctttagccgcgattttcagttatggcaaattaataattataagcctgataaagtgtactgtgtaccgagtgctgaccacaagattatgatcagcaaagtcaacgagctggcccagattctccaagaagttgcaaactctgcgagtgatcttcttgcagtggct

SEQ ID NO: 992 - protein, 263 aa, synthetic construct
  REGION 1..263: note = Round 4 (Selectivity)
MVSAHFILIHSICHGAWLWYKLIPLLQSAGHNVTAIDLWASGQNPRQLEQIGTWEQYSEPLFTLIESIPEGKKVILVGESGGGINIALAAEKYPEKVSALVFVNALMPDIDHSPAFVYKKYSEVFTDWKDSIFSNYTYGNDTVTAIELGDRTLAENIFSNSPIEDVELAKHRVRKGSFFLQDLDTLPNFTSEGYGSIRRVYVYGEEDQIFSRDFQLWQINNYKPDKVYCVPSADHKIMISKVNELAQILQEVANSASDLLAVA

SEQ ID NO: 993 - DNA, 789 bp, synthetic construct
  misc_feature 1..789: note = Round 4 (Selectivity)
  source 1..789: mol_type = other DNA
atggttagtgcgcattttattctgatccacagtatttgccatggcgcctggctgtggtataaactgatcccgttattacagtctgcaggtcataacgttacggcgattgatctttgggctagcgggatgaatcctcgccaactggaacagattggcacatgggagcagtactcagaaccattgttcacgctgatcgaatcgattccggaaggtaagaaagtcattctggtaggagaatccgggggcggcatcaatattgcactggccgcggagaaatatccggagaaagtgagcgccctcgtctttagcaacgcacttatgcccgatatcgatcacagtccagcgttcgtgtataagaaatatagcgaagttttcactgactggaaagattcgatcttcagcaattatacctacggtaacgacacggttaccgcggtggaattgggagatcgtactctggccgagaacatcttctccaattctccgattgaagatgtagaactggcgaaacatcgtgtccgcaaaggctccttttttctgcaagacttggataccctgccgaactttacgtcggaagggtatggttcaattcgtcgtgtgtatgtttacggcgaagaagaccagatctttagccgcgattttcagttatggcaaattaataattataagcctgataaagtgtactgtgtaccgggggctgaccacaagattatgatcagcaaagtcaacgagctggcccagattctccaagaagttgcaaactctgcgagtgatcttcttgcagtggct

SEQ ID NO: 994 - protein, 263 aa, synthetic construct
  REGION 1..263: note = Round 4 (Selectivity)
MVSAHFILIHSICHGAWLWYKLIPLLQSAGHNVTAIDLWASGMNPRQLEQIGTWEQYSEPLFTLIESIPEGKKVILVGESGGGINIALAAEKYPEKVSALVFSNALMPDIDHSPAFVYKKYSEVFTDWKDSIFSNYTYGNDTVTAVELGDRTLAENIFSNSPIEDVELAKHRVRKGSFFLQDLDTLPNFTSEGYGSIRRVYVYGEEDQIFSRDFQLWQINNYKPDKVYCVPGADHKIMISKVNELAQILQEVANSASDLLAVA

SEQ ID NO: 995 - DNA, 789 bp, synthetic construct
  misc_feature 1..789: note = Round 4 (Selectivity)
  source 1..789: mol_type = other DNA
atggttagtgcgcattttattctgatccacagtgtttgccatggcgcctggctgtggtataaactgatcccgttattacagtctgcaggtcataacgttacggcgattgatctttgggctagcgggcagaatcctcgccaactggaacagattggcacatgggagcagtactcagaaccattgttcaccctgatcgaatcgattccggaaggtaagaaagtcattctggtaggagaatccggtggcggcatcaatattgcactggccgcggagaaatatccggagaaagtgagcgccctcgtctttctgaacgcacttatgcccgatatcgatcacagtccagcgttcgtgtataagaaatatagcgaagttttcactgactggaaagattcgatcttcagcaattatacctacggtaacgacacggttaccgcgattgaattgggagatcgtactctggccgagaacatcttctccaattctccgattgaagatgtagaactggcgaaacatcgtgtccgcaaaggctccttttttgtgcaagacttggataccctgccgaactttacgtcggaagggtatggttcaattcgtcgtgtgtatgtttacggcgaagaagaccagatctttagccgcgattttcagttatggcaaattaataattataagcctgataaagtgtactgtgtaccgggggctgaccacaagattatgatcagccgcgtcaacgagctggcccagattctccaagaagttgcaaactctgcgagtgatcttcttgcagtggct

SEQ ID NO: 996 - protein, 263 aa, synthetic construct
  REGION 1..263: note = Round 4 (Selectivity)
MVSAHFILIHSVCHGAWLWYKLIPLLQSAGHNVTAIDLWASGQNPRQLEQIGTWEQYSEPLFTLIESIPEGKKVILVGESGGGINIALAAEKYPEKVSALVFLNALMPDIDHSPAFVYKKYSEVFTDWKDSIFSNYTYGNDTVTAIELGDRTLAENIFSNSPIEDVELAKHRVRKGSFFVQDLDTLPNFTSEGYGSIRRVYVYGEEDQIFSRDFQLWQINNYKPDKVYCVPGADHKIMISRVNELAQILQEVANSASDLLAVA

SEQ ID NO: 997 - DNA, 789 bp, synthetic construct
  misc_feature 1..789: note = Round 4 (Selectivity)
  source 1..789: mol_type = other DNA
atggttagtgcgcattttattctgatccacagtgtttgccatggcgcctggctgtggtataaactgatcccgttattacagtctgcaggtcataacgttacggcgattgatctttgggctagcgggagtaatcctcgccaactggaacagattggcacatgggagcagtactcagaaccattgttcacgctgatcgaatcgattccggaaggtaagaaagtcattctggtaggagaatccgggggcggcatcaatattgcactggccgcggagaaatatccggagaaagtgagcgccctcgtctttagcaacgcacttatgcccgatatcgatcacagtccagcgttcgtgtataagaaatatagcgaagttttcactgactggaaagattcgatcttcagcaattatacctacggtaacgacacggttaccgcgattgaattgggagatcgtactctggccgagaacatcttctccaattctccgattgaagatgtagaactggcgaaacatcgtgtccgcaaaggctccttttttgagcaagacttggataccctgccgaactttacgtcggaagggtatggttcaattcgtcgtgtgtatgtttacggcgaagaagaccagatctttagccgcgattttcagttatggcaaattaataattataagcctgataaagtgtactgtgtaccgagtgctgaccacaagattatgatcagcaaagtcaacgagctggcccagattctccaagaagttgcaaactctgcgagtgatcttcttgcagtggct

SEQ ID NO: 998 - protein, 263 aa, synthetic construct
  REGION 1..263: note = Round 4 (Selectivity)
MVSAHFILIHSVCHGAWLWYKLIPLLQSAGHNVTAIDLWASGSNPRQLEQIGTWEQYSEPLFTLIESIPEGKKVILVGESGGGINIALAAEKYPEKVSALVFSNALMPDIDHSPAFVYKKYSEVFTDWKDSIFSNYTYGNDTVTAIELGDRTLAENIFSNSPIEDVELAKHRVRKGSFFEQDLDTLPNFTSEGYGSIRRVYVYGEEDQIFSRDFQLWQINNYKPDKVYCVPSADHKIMISKVNELAQILQEVANSASDLLAVA

SEQ ID NO: 999 - DNA, 789 bp, synthetic construct
  misc_feature 1..789: note = Round 4 (Activity)
  source 1..789: mol_type = other DNA
atggttagtgcgcattttattctgatccacagtatttgccatggcgcctggctgtggtataaactgatcccgttattacagtctgcaggtcataacgttacggcgattgatctttgggctagcgggagtaatcctcgccaactggaacagattggcacatgggagcagtactcagaaccattgttcaccctgatcgaatcgattccggaaggtaagaaagtcattctggtaggagaatccggtggcggcatcaatattgcactggccgcggagaaatatccggagaaagtgagcgccctcgtctttaccaacgcacttatgcccgatatcgatcacagtccagcgttcgtgtataagaaatatagcgaagttttcactgactggaaagattcgatcttcagcaattatacctacggtaacgacacggttaccgcggtggaattgggagatcgtactctggccgagaacatcttctccaattctccgattgaagatgtagaactggcgaaacatcgtgtccgcaaaggctccttctttgagcaagacttggataccctgccgaactttacgtcggaagggtatggttcaattcgtcgtgtgtatgtttacggcgaagaagaccagatctttagccgcgattttcagttatggcaaattaataattataagcctgataaagtgtactgtgtaccgagtgctgaccacaagattatgatcagcaaggtcaacgagctggcccagattctccaagaagttgcaaactctgcgagtgatcttcttgtagtggct

SEQ ID NO: 1000 - protein, 263 aa, synthetic construct
  REGION 1..263: note = Round 4 (Activity)
MVSAHFILIHSICHGAWLWYKLIPLLQSAGHNVTAIDLWASGSNPRQLEQIGTWEQYSEPLFTLIESIPEGKKVILVGESGGGINIALAAEKYPEKVSALVFTNALMPDIDHSPAFVYKKYSEVFTDWKDSIFSNYTYGNDTVTAVELGDRTLAENIFSNSPIEDVELAKHRVRKGSFFEQDLDTLPNFTSEGYGSIRRVYVYGEEDQIFSRDFQLWQINNYKPDKVYCVPSADHKIMISKVNELAQILQEVANSASDLLVVA

SEQ ID NO: 1001 - DNA, 789 bp, synthetic construct
  misc_feature 1..789: note = Round 4 (Selectivity)
  source 1..789: mol_type = other DNA
atggttagtgcgcattttattctgatccacagtgtttgccatggcgcctggctgtggtataaactgatcccgttattacagtctgcaggtcataacgttacggcgattgatctttgggctagcgggtcgaatcctcgccaactggaacagattggcacatgggagcagtactcagaaccattgttcaccctgatcgaatcgattccggaaggtaagaaagtcattctggtaggagaatccgggggcggcatcaatattgcactggccgcggagaaatatccggagaaagtgagcgccctcgtctttagcaacgcacttatgcccgatatcgatcacagtccagcgttcgtgtataagaaatatagcgaagttttcactgactggaaagattcgatcttcagcaattatacctacggtaacgacacggttaccgcggtggaattgggagatcgtactctggccgagaacatcttctccaattctccgattgaagatgtagaactggcgaaacatcgtgtccgcaaaggctccttttttctgcaagacttggataccctgccgaactttacgtcggaagggtatggttcaattcgtcgtgtgtatgtttacggcgaagaagaccagatctttagccgcgattttcagttatggcaaattaataattataagcctgataaagtgtactgtgtaccgggggctgaccacaagattatgatcagccgcgtcaacgagctggcccagattctccaagaagttgcaaactctgcgagtgatcttcttgcagtggct

SEQ ID NO: 1002 - protein, 263 aa, synthetic construct
  REGION 1..263: note = Round 4 (Selectivity)
MVSAHFILIHSVCHGAWLWYKLIPLLQSAGHNVTAIDLWASGSNPRQLEQIGTWEQYSEPLFTLIESIPEGKKVILVGESGGGINIALAAEKYPEKVSALVFSNALMPDIDHSPAFVYKKYSEVFTDWKDSIFSNYTYGNDTVTAVELGDRTLAENIFSNSPIEDVELAKHRVRKGSFFLQDLDTLPNFTSEGYGSIRRVYVYGEEDQIFSRDFQLWQINNYKPDKVYCVPGADHKIMISRVNELAQILQEVANSASDLLAVA

SEQ ID NO: 1003 - DNA, 789 bp, synthetic construct
  misc_feature 1..789: note = Round 4 (Activity)
  source 1..789: mol_type = other DNA
atggttagtgcgcattttattctgatccacagtgtttgccatggcgcctggctgtggtataaactgatcccgttattacagtctgcaggtcataacgttacggcgattgatctttgggctagcgggatgaatcctcgccaactggaacagattggcacatgggagcagtactcagaaccattgttcaccctgatcgaatcgattccggaaggtaagaaagtcattctggtaggagaatcctttggcggcatcaatattgcactggccgcggagaaatatccggagaaagtgagcgccctcgtctttagcaacgcacttatgcccgatatcgatcacagtccagcgttcgtgtataagaaatatagcgaagttttcactgactggaaagattcgatcttcagcaattatacctacggtaacgacacggttaccgcgattgaattgggagatcgtactctggccgagaacatcttctccaattctccgattgaagatgtagaactggcgaaacatcgtgtccgcaaaggctccttctttgagcaagacttggataccctgccgaactttacgtcggaagggtatggttcaattcgtcgtgtgtatgtttacggcgaagaagaccagatctttagccgcgattttcagttatggcaaattaataattataagcctgataaagtgtactgtgtaccgggggctgaccacaagattatgatcagccgcgtcaacgagctggcccagattctccaagaagttgcaaactctgcgagtgatcttcttgcagtggct

SEQ ID NO: 1004 - protein, 263 aa, synthetic construct
  REGION 1..263: note = Round 4 (Activity)
MVSAHFILIHSVCHGAWLWYKLIPLLQSAGHNVTAIDLWASGMNPRQLEQIGTWEQYSEPLFTLIESIPEGKKVILVGESFGGINIALAAEKYPEKVSALVFSNALMPDIDHSPAFVYKKYSEVFTDWKDSIFSNYTYGNDTVTAIELGDRTLAENIFSNSPIEDVELAKHRVRKGSFFEQDLDTLPNFTSEGYGSIRRVYVYGEEDQIFSRDFQLWQINNYKPDKVYCVPGADHKIMISRVNELAQILQEVANSASDLLAVA

SEQ ID NO: 1005 - DNA, 789 bp, synthetic construct
  misc_feature 1..789: note = Round 4 (Activity)
  source 1..789: mol_type = other DNA
atggttagtgcgcattttattctgatccacagtgtttgccatggcgcctggctgtggtataaactgatcccgttattacagtctgcaggtcataacgttacggcgattgatctttgggctagcgggatgaatcctcgccaactggaacagattggcacatgggagcagtactcagaaccattgttcaccctgatcgaatcgattccggaaggtaagaaagtcattctggtaggagaatcctttggcggcatcaatattgcactggccgcggagaaatatccggagaaagtgagcgccctcgtctttagcaacgcacttatgcccgatatcgatcacagtccagcgttcgtgtataagaaatatagcgaagttttcactgactggaaagattcgatcttcagcaattatacctacggtaacgacacggttaccgcggtggaattgggagatcgtactctggccgagaacatcttctccaattctccgattgaagatgtagaactggcgaaacatcgtgtccgcaaaggctccttttttgagcaagacttggataccctgccgaactttacgtcggaagggtatggttcaattcgtcgtgtgtatgtttacggcgaagaagaccagatctttagccgcgattttcagttatggcaaattaataattataagcctgataaagtgtactgtgtaccgagtgctgaccacaagattatgatcagccgcgtcaacgagctggcccagattctccaagaagttgcaaactctgcgagtgatcttcttgcagtggct

SEQ ID NO: 1006 - protein, 263 aa, synthetic construct
  REGION 1..263: note = Round 4 (Activity)
MVSAHFILIHSVCHGAWLWYKLIPLLQSAGHNVTAIDLWASGMNPRQLEQIGTWEQYSEPLFTLIESIPEGKKVILVGESFGGINIALAAEKYPEKVSALVFSNALMPDIDHSPAFVYKKYSEVFTDWKDSIFSNYTYGNDTVTAVELGDRTLAENIFSNSPIEDVELAKHRVRKGSFFEQDLDTLPNFTSEGYGSIRRVYVYGEEDQIFSRDFQLWQINNYKPDKVYCVPSADHKIMISRVNELAQILQEVANSASDLLAVA

SEQ ID NO: 1007 - DNA, 789 bp, synthetic construct
  misc_feature 1..789: note = Round 4 (Selectivity)
  source 1..789: mol_type = other DNA
atggttagtgcgcattttattctgatccacagtgtttgccatggcgcctggctgtggtataaactgatcccgttattacagtctgcaggtcataacgttacggcgattgatctttgggctagcgggatgaatcctcgccaactggaacagattggcacatgggagcagtactcagaaccattgttcaccctgatcgaatcgattccggaaggtaagaaagtcattctggtaggagaatccgggggcggcatcaatattgcactggccgcggagaaatatccggagaaagtgagcgccctcgtctttagcaacgcacttatgcccgatatcgatcacagtccagcgttcgtgtataagaaatatagcgaagttttcactgactggaaagattcgatcttcagcaattatacctacggtaacgacacggttaccgcggtggaattgggagatcgtactctggccgagaacatcttctccaattctccgattgaagatgtagaactggcgaaacatcgtgtccgcaaaggctccttttttctgcaagacttggataccctgccgaactttacgtcggaagggtatggttcaattcgtcgtgtgtatgtttacggcgaagaagaccagatctttagccgcgattttcagttatggcaaattaataattataagcctgataaagtgtactgtgtaccgagtgctgaccacaagattatgatcagccgcgtcaacgagctggcccagattctccaagaagttgcaaactctgcgagtgatcttcttgcagtggct

SEQ ID NO: 1008 - protein, 263 aa, synthetic construct
  REGION 1..263: note = Round 4 (Selectivity)
MVSAHFILIHSVCHGAWLWYKLIPLLQSAGHNVTAIDLWASGMNPRQLEQIGTWEQYSEPLFTLIESIPEGKKVILVGESGGGINIALAAEKYPEKVSALVFSNALMPDIDHSPAFVYKKYSEVFTDWKDSIFSNYTYGNDTVTAVELGDRTLAENIFSNSPIEDVELAKHRVRKGSFFLQDLDTLPNFTSEGYGSIRRVYVYGEEDQIFSRDFQLWQINNYKPDKVYCVPSADHKIMISRVNELAQILQEVANSASDLLAVA

SEQ ID NO: 1009 - DNA, 789 bp, synthetic construct
  misc_feature 1..789: note = Round 4 (Activity)
  source 1..789: mol_type = other DNA
atggttagtgcgcattttattctgatccacagtatttgccatggcgcctggctgtggtataaactgatcccgttattacagtctgcaggtcataacgttacggcgattgatctttgggctagcgggtcgaatcctcgccaactggaacagattggcacatgggagcagtactcagaaccattgttcaccctgatcgaatcgattccggaaggtaagaaagtcattctggtaggagaatccgggggcggcatcaatattgcactggccgcggagaaatatccggagaaagtgagcgccctcgtctttagcaacgcacttatgcccgatatcgatcacagtccagcgttcgtgtataagaaatatagcgaagttttcactgactggaaagattcgatcttcagcaattatacctacggtaacgacacggttaccgcgattgaattgggagatcgtactctggccgagaacatcttctccaattctccgattgaagatgtagaactggcgaaacatcgtgtccgcaaaggctccttttttgtgcaagacttggataccctgccgaactttacgtcggaagggtatggttcaattcgtcgtgtgtatgtttacggcgaagaagaccagatctttagccgcgattttcagttatggcaaattaataattataagcctgataaagtgtactgtgtaccgggggctgaccacaagattatgatcagcaaagtcaacgagctggcccagattctccaagaagttgcaaactctgcgagtgatcttcttgcagtggct

SEQ ID NO: 1010 - protein, 263 aa, synthetic construct
  REGION 1..263: note = Round 4 (Activity)
MVSAHFILIHSICHGAWLWYKLIPLLQSAGHNVTAIDLWASGSNPRQLEQIGTWEQYSEPLFTLIESIPEGKKVILVGESGGGINIALAAEKYPEKVSALVFSNALMPDIDHSPAFVYKKYSEVFTDWKDSIFSNYTYGNDTVTAIELGDRTLAENIFSNSPIEDVELAKHRVRKGSFFVQDLDTLPNFTSEGYGSIRRVYVYGEEDQIFSRDFQLWQINNYKPDKVYCVPGADHKIMISKVNELAQILQEVANSASDLLAVA

SEQ ID NO: 1011 - DNA, 789 bp, synthetic construct
  misc_feature 1..789: note = Round 4 (Selectivity)
  source 1..789: mol_type = other DNA
atggttagtgcgcattttattctgatccacagtgtttgccatggcgcctggctgtggtataaactgatcccgttattacagtctgcaggtcataacgttacggcgattgatctttgggctagcgggcagaatcctcgccaactggaacagattggcacatgggagcagtactcagaaccattgttcaccctgatcgaatcgattccggaaggtaagaaagtcattctggtaggagaatccgggggcggcatcaatattgcactggccgcggagaaatatccggagaaagtgagcgccctcgtctttctgaacgcacttatgcccgatatcgatcacagtccagcgttcgtgtataagaaatatagcgaagttttcactgactggaaagattcgatcttcagcaattatacctacggtaacgacacggttaccgcggtggaattgggagatcgtactctggccgagaacatcttctccaattctccgattgaagatgtagaactggcgaaacatcgtgtccgcaaaggctccttttttgtgcaagacttggataccctgccgaactttacgtcggaagggtatggttcaattcgtcgtgtgtatgtttacggcgaagaagaccagatctttagccgcgattttcagttatggcaaattaataattataagcctgataaagtgtactgtgtaccgagtgctgaccacaagattatgatcagccgcgtcaacgagctggcccagattctccaagaagttgcaaactctgcgagtgatcttcttgcagtggct

SEQ ID NO: 1012 - protein, 263 aa, synthetic construct
  REGION 1..263: note = Round 4 (Selectivity)
MVSAHFILIHSVCHGAWLWYKLIPLLQSAGHNVTAIDLWASGQNPRQLEQIGTWEQYSEPLFTLIESIPEGKKVILVGESGGGINIALAAEKYPEKVSALVFLNALMPDIDHSPAFVYKKYSEVFTDWKDSIFSNYTYGNDTVTAVELGDRTLAENIFSNSPIEDVELAKHRVRKGSFFVQDLDTLPNFTSEGYGSIRRVYVYGEEDQIFSRDFQLWQINNYKPDKVYCVPSADHKIMISRVNELAQILQEVANSASDLLAVA

SEQ ID NO: 1013 - DNA, 789 bp, synthetic construct
  misc_feature 1..789: note = Round 4 (Activity)
  source 1..789: mol_type = other DNA
atggttagtgcgcattttattctgatccacagtgtttgccatggcgcctggctgtggtataaactgatcccgttattacagtctgcaggtcataacgttacggcgattgatctttgggctagcgggatgaatcctcgccaactggaacagattggcacatgggagcagtactcagaaccattgttcacgctgatcgaatcgattccggaaggtaagaaagtcattctggtaggagaatccgggggcggcatcaatattgcactggccgcggagaaatatccggagaaagtgagcgccctcgtctttgtgaacgcacttatgcccgatatcgatcacagtccagcgttcgtgtataagaaatatagcgaagttttcactgactggaaagattcgatcttcagcaattatacctacggtaacgacacggttaccgcggtggaattgggagatcgtactctggccgagaacatcttctccaattctccgattgaagatgtagaactggcgaaacatcgtgtccgcaaaggctccttttttgagcaagacttggataccctgccgaactttacgtcggaagggtatggttcaattcgtcgtgtgtatgtttacggcgaagaagaccagatctttagccgcgattttcagttatggcaaattaataattataagcctgataaagtgtactgtgtaccgagtgctgaccacaagattatgatcagccgcgtcaacgagctggcccagattctccaagaagttgcaaactctgcgagtgatcttcttgcagtggct

SEQ ID NO: 1014 - protein, 263 aa, synthetic construct
  REGION 1..263: note = Round 4 (Activity)
MVSAHFILIHSVCHGAWLWYKLIPLLQSAGHNVTAIDLWASGMNPRQLEQIGTWEQYSEPLFTLIESIPEGKKVILVGESGGGINIALAAEKYPEKVSALVFVNALMPDIDHSPAFVYKKYSEVFTDWKDSIFSNYTYGNDTVTAVELGDRTLAENIFSNSPIEDVELAKHRVRKGSFFEQDLDTLPNFTSEGYGSIRRVYVYGEEDQIFSRDFQLWQINNYKPDKVYCVPSADHKIMISRVNELAQILQEVANSASDLLAVA

SEQ ID NO: 1015 - DNA, 789 bp, synthetic construct
  misc_feature 1..789: note = Round 4 (Selectivity)
  source 1..789: mol_type = other DNA
atggttagtgcgcattttattctgatccacagtatttgccatggcgcctggctgtggtataaactgatcccgttattacagtctgcaggtcataacgttacggcgattgatctttgggctagcgggatgaatcctcgccaactggaacagattggcacatgggagcagtactcagaaccattgttcaccctgatcgaatcgattccggaaggtaagaaagtcattctggtaggagaatccgggggcggcatcaatattgcactggccgcggagaaatatccggagaaagtgagcgccctcgtctttctgaacgcacttatgcccgatatcgatcacagtccagcgttcgtgtataagaaatatagcgaagttttcactgactggaaagattcgatcttcagcaattatacctacggtaacgacacggttaccgcgattgaattgggagatcgtactctggccgagaacatcttctccaattctccgattgaagatgtagaactggcgaaacatcgtgtccgcaaaggctccttttttgtgcaagacttggataccctgccgaactttacgtcggaagggtatggttcaattcgtcgtgtgtatgtttacggcgaagaagaccagatctttagccgcgattttcagttatggcaaattaataattataagcctgataaagtgtactgtgtaccgagtgctgaccacaagattatgatcagcaaagtcaacgagctggcccagattctccaagaagttgcaaactctgcgagtgatcttcttgcagtggct

SEQ ID NO: 1016 - protein, 263 aa, synthetic construct
  REGION 1..263: note = Round 4 (Selectivity)
MVSAHFILIHSICHGAWLWYKLIPLLQSAGHNVTAIDLWASGMNPRQLEQIGTWEQYSEPLFTLIESIPEGKKVILVGESGGGINIALAAEKYPEKVSALVFLNALMPDIDHSPAFVYKKYSEVFTDWKDSIFSNYTYGNDTVTAIELGDRTLAENIFSNSPIEDVELAKHRVRKGSFFVQDLDTLPNFTSEGYGSIRRVYVYGEEDQIFSRDFQLWQINNYKPDKVYCVPSADHKIMISKVNELAQILQEVANSASDLLAVA

SEQ ID NO: 1017 - DNA, 789 bp, synthetic construct
  misc_feature 1..789: note = Round 4 (Selectivity)
  source 1..789: mol_type = other DNA
atggttagtgcgcattttattctgatccacagtgtttgccatggcgcctggctgtggtataaactgatcccgttattacagtctgcaggtcataacgttacggcgattgatctttgggctagcgggcagaatcctcgccaactggaacagattggcacatgggagcagtactcagaaccattgttcaccctgatcgaatcgattccggaaggtaagaaagtcattctggtaggagaatccggtggcggcatcaatattgcactggccgcggagaaatatccggagaaagtgagcgccctcgtctttctgaacgcacttatgcccgatatcgatcacagtccagcgttcgtgtataagaaatatagcgaagttttcactgactggaaagattcgatcttcagcaattatacctacggtaacgacacggttaccgcgattgaattgggagatcgtactctggccgagaacatcttctccaattctccgattgaagatgtagaactggcgaaacatcgtgtccgcaaaggctccttttttgtgcaagacttggataccctgccgaactttacgtcggaagggtatggttcaattcgtcgtgtgtatgtttacggcgaagaagaccagatctttagccgcgattttcagttatggcaaattaataattataagcctgataaagtgtactgtgtaccgagtgctgaccacaagattatgatcagccgcgtcaacgagctggcccagattctccaagaagttgcaaactctgcgagtgatcttcttgcagtggct

SEQ ID NO: 1018 - protein, 263 aa, synthetic construct
  REGION 1..263: note = Round 4 (Selectivity)
MVSAHFILIHSVCHGAWLWYKLIPLLQSAGHNVTAIDLWASGQNPRQLEQIGTWEQYSEPLFTLIESIPEGKKVILVGESGGGINIALAAEKYPEKVSALVFLNALMPDIDHSPAFVYKKYSEVFTDWKDSIFSNYTYGNDTVTAIELGDRTLAENIFSNSPIEDVELAKHRVRKGSFFVQDLDTLPNFTSEGYGSIRRVYVYGEEDQIFSRDFQLWQINNYKPDKVYCVPSADHKIMISRVNELAQILQEVANSASDLLAVA

SEQ ID NO: 1019 - DNA, 789 bp, synthetic construct
  misc_feature 1..789: note = Round 4 (Activity)
  source 1..789: mol_type = other DNA
atggttagtgcgcattttattctgatccacagtatttgccatggcgcctggctgtggtataaactgatcccgttattacagtctgcaggtcataacgttacggcgattgatctttgggctagcgggagtaatcctcgccaactggaacagattggcacatgggagcagtactcagaaccattgttcaccctgatcgaatcgattccggaaggtaagaaagtcattctggtaggagaatccggtggcggcatcaatattgcactggccgcggagaaatatccggagaaagtgagcgccctcgtctttgcgaacgcacttatgcccgatatcgatcacagtccagcgttcgtgtataagaaatatagcgaagttttcactgactggaaagattcgatcttcagcaattatacctacggtaacgacacggttaccgcggtggaattgggagatcgtactctggccgagaacatcttctccaattctccgattgaagatgtagaactggcgaaacatcgtgtccgcaaaggctccttctttgagcaagacttggataccctgccgaactttacgtcggaagggtatggttcaattcgtcgtgtgtatgtttacggcgaagaagaccagatctttagccgcgattttcagttatggcaaattaataattataagcctgataaagtgtactgtgtaccgagtgctgaccacaagattatgatcagcaaggtcaacgagctggcccagattctccaagaagttgcaaactctgcgagtgatcttcttgcagtggct

SEQ ID NO: 1020 - protein, 263 aa, synthetic construct
  REGION 1..263: note = Round 4 (Activity)
MVSAHFILIHSICHGAWLWYKLIPLLQSAGHNVTAIDLWASGSNPRQLEQIGTWEQYSEPLFTLIESIPEGKKVILVGESGGGINIALAAEKYPEKVSALVFANALMPDIDHSPAFVYKKYSEVFTDWKDSIFSNYTYGNDTVTAVELGDRTLAENIFSNSPIEDVELAKHRVRKGSFFEQDLDTLPNFTSEGYGSIRRVYVYGEEDQIFSRDFQLWQINNYKPDKVYCVPSADHKIMISKVNELAQILQEVANSASDLLAVA

SEQ ID NO: 1021 - DNA, 789 bp, synthetic construct
  misc_feature 1..789: note = Round 4 (Selectivity)
  source 1..789: mol_type = other DNA
atggttagtgcgcattttattctgatccacagtgtttgccatggcgcctggctgtggtataaactgatcccgttattacagtctgcaggtcataacgttacggcgattgatctttgggctagcgggtcgaatcctcgccaactggaacagattggcacatgggagcagtactcagaaccattgttcacgctgatcgaatcgattccggaaggtaagaaagtcattctggtaggagaatccgggggcggcatcaatattgcactggccgcggagaaatatccggagaaagtgagcgccctcgtctttgtgaacgcacttatgcccgatatcgatcacagtccagcgttcgtgtataagaaatatagcgaagttttcactgactggaaagattcgatcttcagcaattatacctacggtaacgacacggttaccgcggtggaattgggagatcgtactctggccgagaacatcttctccaattctccgattgaagatgtagaactggcgaaacatcgtgtccgcaaaggctccttttttgtgcaagacttggataccctgccgaactttacgtcggaagggtatggttcaattcgtcgtgtgtatgtttacggcgaagaagaccagatctttagccgcgattttcagttatggcaaattaataattataagcctgataaagtgtactgtgtaccgagtgctgaccacaagattatgatcagccgcgtcaacgagctggcccagattctccaagaagttgcaaactctgcgagtgatcttcttgcagtggct

SEQ ID NO: 1022 - protein, 263 aa, synthetic construct
  REGION 1..263: note = Round 4 (Selectivity)
MVSAHFILIHSVCHGAWLWYKLIPLLQSAGHNVTAIDLWASGSNPRQLEQIGTWEQYSEPLFTLIESIPEGKKVILVGESGGGINIALAAEKYPEKVSALVFVNALMPDIDHSPAFVYKKYSEVFTDWKDSIFSNYTYGNDTVTAVELGDRTLAENIFSNSPIEDVELAKHRVRKGSFFVQDLDTLPNFTSEGYGSIRRVYVYGEEDQIFSRDFQLWQINNYKPDKVYCVPSADHKIMISRVNELAQILQEVANSASDLLAVA

SEQ ID NO: 1023 - DNA, 789 bp, synthetic construct
  misc_feature 1..789: note = Round 4 (Activity)
  source 1..789: mol_type = other DNA
atggttagtgcgcattttattctgatccacagtatttgccatggcgcctggctgtggtataaactgatcccgttattacagtctgcaggtcataacgttacggcgattgatctttgggctagcgggatgaatcctcgccaactggaacagattggcacatgggagcagtactcagaaccattgttcaccctgatcgaatcgattccggaaggtaagaaagtcattctggtaggagaatccgggggcggcatcaatattgcactggccgcggagaaatatccggagaaagtgagcgccctcgtctttctgaacgcacttatgcccgatatcgatcacagtccagcgttcgtgtataagaaatatagcgaagttttcactgactggaaagattcgatcttcagcaattatacctacggtaacgacacggttaccgcggtggaattgggagatcgtactctggccgagaacatcttctccaattctccgattgaagatgtagaactggcgaaacatcgtgtccgcaaaggctccttttttgtgcaagacttggataccctgccgaactttacgtcggaagggtatggttcaattcgtcgtgtgtatgtttacggcgaagaagaccagatctttagccgcgattttcagttatggcaaattaataattataagcctgataaagtgtactgtgtaccgagtgctgaccacaagattatgatcagccgcgtcaacgagctggcccagattctccaagaagttgcaaactctgcgagtgatcttcttgcagtggct

SEQ ID NO: 1024 - protein, 263 aa, synthetic construct
  REGION 1..263: note = Round 4 (Activity)
MVSAHFILIHSICHGAWLWYKLIPLLQSAGHNVTAIDLWASGMNPRQLEQIGTWEQYSEPLFTLIESIPEGKKVILVGESGGGINIALAAEKYPEKVSALVFLNALMPDIDHSPAFVYKKYSEVFTDWKDSIFSNYTYGNDTVTAVELGDRTLAENIFSNSPIEDVELAKHRVRKGSFFVQDLDTLPNFTSEGYGSIRRVYVYGEEDQIFSRDFQLWQINNYKPDKVYCVPSADHKIMISRVNELAQILQEVANSASDLLAVA

SEQ ID NO: 1025 - DNA, 789 bp, synthetic construct
  misc_feature 1..789: note = Round 4 (Selectivity)
  source 1..789: mol_type = other DNA
atggttagtgcgcattttattctgatccacagtgtttgccatggcgcctggctgtggtataaactgatcccgttattacagtctgcaggtcataacgttacggcgattgatctttgggctagcgggatgaatcctcgccaactggaacagattggcacatgggagcagtactcagaaccattgttcaccctgatcgaatcgattccggaaggtaagaaagtcattctggtaggagaatccgggggcggcatcaatattgcactggccgcggagaaatatccggagaaagtgagcgccctcgtctttctgaacgcacttatgcccgatatcgatcacagtccagcgttcgtgtataagaaatatagcgaagttttcactgactggaaagattcgatcttcagcaattatacctacggtaacgacacggttaccgcggtggaattgggagatcgtactctggccgagaacatcttctccaattctccgattgaagatgtagaactggcgaaacatcgtgtccgcaaaggctccttttttctgcaagacttggataccctgccgaactttacgtcggaagggtatggttcaattcgtcgtgtgtatgtttacggcgaagaagaccagatctttagccgcgattttcagttatggcaaattaataattataagcctgataaagtgtactgtgtaccgagtgctgaccacaagattatgatcagccgcgtcaacgagctggcccagattctccaagaagttgcaaactctgcgagtgatcttcttgcagtggct

SEQ ID NO: 1026 - protein, 263 aa, synthetic construct
  REGION 1..263: note = Round 4 (Selectivity)
MVSAHFILIHSVCHGAWLWYKLIPLLQSAGHNVTAIDLWASGMNPRQLEQIGTWEQYSEPLFTLIESIPEGKKVILVGESGGGINIALAAEKYPEKVSALVFLNALMPDIDHSPAFVYKKYSEVFTDWKDSIFSNYTYGNDTVTAVELGDRTLAENIFSNSPIEDVELAKHRVRKGSFFLQDLDTLPNFTSEGYGSIRRVYVYGEEDQIFSRDFQLWQINNYKPDKVYCVPSADHKIMISRVNELAQILQEVANSASDLLAVA

SEQ ID NO: 1027 - DNA, 789 bp, synthetic construct
  misc_feature 1..789: note = Round 4 (Activity)
  source 1..789: mol_type = other DNA
atggttagtgcgcattttattctgatccacagtgtttgccatggcgcctggctgtggtataaactgatcccgttattacagtctgcaggtcataacgttacggcgattgatctttgggctagcgggtcgaatcctcgccaactggaacagattggcacatgggagcagtactcagaaccattgttcacgctgatcgaatcgattccggaaggtaagaaagtcattctggtaggagaatccggtggcggcatcaatattgcactggccgcggagaaatatccggagaaagtgagcgccctcgtctttctgaacgcacttatgcccgatatcgatcacagtccagcgttcgtgtataagaaatatagcgaagttttcactgactggaaagattcgatcttcagcaattatacctacggtaacgacacggttaccgcgattgaattgggagatcgtactctggccgagaacatcttctccaattctccgattgaagatgtagaactggcgaaacatcgtgtccgcaaaggctccttctttgagcaagacttggataccctgccgaactttacgtcggaagggtatggttcaattcgtcgtgtgtatgtttacggcgaagaagaccagatctttagccgcgattttcagttatggcaaattaataattataagcctgataaagtgtactgtgtaccgagtgctgaccacaagattatgatcagccgcgtcaacgagctggcccagattctccaagaagttgcaaactctgcgagtgatcttcttgcagtggct

SEQ ID NO: 1028 - protein, 263 aa, synthetic construct
  REGION 1..263: note = Round 4 (Activity)
MVSAHFILIHSVCHGAWLWYKLIPLLQSAGHNVTAIDLWASGSNPRQLEQIGTWEQYSEPLFTLIESIPEGKKVILVGESGGGINIALAAEKYPEKVSALVFLNALMPDIDHSPAFVYKKYSEVFTDWKDSIFSNYTYGNDTVTAIELGDRTLAENIFSNSPIEDVELAKHRVRKGSFFEQDLDTLPNFTSEGYGSIRRVYVYGEEDQIFSRDFQLWQINNYKPDKVYCVPSADHKIMISRVNELAQILQEVANSASDLLAVA

SEQ ID NO: 1029 - DNA, 789 bp, synthetic construct
  misc_feature 1..789: note = Round 4 (Selectivity)
  source 1..789: mol_type = other DNA
atggttagtgcgcattttattctgatccacagtgtttgccatggcgcctggctgtggtataaactgatcccgttattacagtctgcaggtcataacgttacggcgattgatctttgggctagcgggatgaatcctcgccaactggaacagattggcacatgggagcagtactcagaaccattgttcaccctgatcgaatcgattccggaaggtaagaaagtcattctggtaggagaatccgggggcggcatcaatattgcactggccgcggagaaatatccggagaaagtgagcgccctcgtctttagcaacgcacttatgcccgatatcgatcacagtccagcgttcgtgtataagaaatatagcgaagttttcactgactggaaagattcgatcttcagcaattatacctacggtaacgacacggttaccgcgattgaattgggagatcgtactctggccgagaacatcttctccaattctccgattgaagatgtagaactggcgaaacatcgtgtccgcaaaggctccttttttctgcaagacttggataccctgccgaactttacgtcggaagggtatggttcaattcgtcgtgtgtatgtttacggcgaagaagaccagatctttagccgcgattttcagttatggcaaattaataattataagcctgataaagtgtactgtgtaccgggggctgaccacaagattatgatcagccgcgtcaacgagctggcccagattctccaagaagttgcaaactctgcgagtgatcttcttgcagtggct

SEQ ID NO: 1030 - protein, 263 aa, synthetic construct
  REGION 1..263: note = Round 4 (Selectivity)
MVSAHFILIHSVCHGAWLWYKLIPLLQSAGHNVTAIDLWASGMNPRQLEQIGTWEQYSEPLFTLIESIPEGKKVILVGESGGGINIALAAEKYPEKVSALVFSNALMPDIDHSPAFVYKKYSEVFTDWKDSIFSNYTYGNDTVTAIELGDRTLAENIFSNSPIEDVELAKHRVRKGSFFLQDLDTLPNFTSEGYGSIRRVYVYGEEDQIFSRDFQLWQINNYKPDKVYCVPGADHKIMISRVNELAQILQEVANSASDLLAVA

SEQ ID NO: 1031 - DNA, 789 bp, synthetic construct
  misc_feature 1..789: note = Round 4 (Selectivity)
  source 1..789: mol_type = other DNA
atggttagtgcgcattttattctgatccacagtatttgccatggcgcctggctgtggtataaactgatcccgttattacagtctgcaggtcataacgttacggcgattgatctttgggctagcgggagtaatcctcgccaactggaacagattggcacatgggagcagtactcagaaccattgttcaccctgatcgaatcgattccggaaggtaagaaagtcattctggtaggagaatccggtggcggcatcaatattgcactggccgcggagaaatatccggagaaagtgagcgccctcgtctttagtaacgcacttatgcccgatatcgatcacagtccagcgttcgtgtataagaaatatagcgaagttttcactgactggaaagattcgatcttcagcaattatacctacggtaacgacacggttgtggcggtggaattgggagatcgtactctggccgagaacatcttctccaattctccgattgaagatgtagaactggcgaaacatcgtgtccgcaaaggctccttctttgagcaagacttggataccctgccgaactttacgtcggaagggtatggttcaattcgtcgtgtgtatgtttacggcgaagaagaccagatctttagccgcgattttcagttatggcaaattaataattataagcctgataaagtgtactgtgtaccgagtgctgaccacaagattatgatcagcaaggtcaacgagctggcccagattctccaagaagttgcaaactctgcgagtgatcttcttgcagtggct

SEQ ID NO: 1032 - protein, 263 aa, synthetic construct
  REGION 1..263: note = Round 4 (Selectivity)
MVSAHFILIHSICHGAWLWYKLIPLLQSAGHNVTAIDLWASGSNPRQLEQIGTWEQYSEPLFTLIESIPEGKKVILVGESGGGINIALAAEKYPEKVSALVFSNALMPDIDHSPAFVYKKYSEVFTDWKDSIFSNYTYGNDTVVAVELGDRTLAENIFSNSPIEDVELAKHRVRKGSFFEQDLDTLPNFTSEGYGSIRRVYVYGEEDQIFSRDFQLWQINNYKPDKVYCVPSADHKIMISKVNELAQILQEVANSASDLLAVA

SEQ ID NO: 1033 - DNA, 789 bp, synthetic construct
  misc_feature 1..789: note = Round 4 (Selectivity)
  source 1..789: mol_type = other DNA
atggttagtgcgcattttattctgatccacagtgtttgccatggcgcctggctgtggtataaactgatcccgttattacagtctgcaggtcataacgttacggcgattgatctttgggctagcgggatgaatcctcgccaactggaacagattggcacatgggagcagtactcagaaccattgttcaccctgatcgaatcgattccggaaggtaagaaagtcattctggtaggagaatccggtggcggcatcaatattgcactggccgcggagaaatatccggagaaagtgagcgccctcgtctttgtgaacgcacttatgcccgatatcgatcacagtccagcgttcgtgtataagaaatatagcgaagttttcactgactggaaagattcgatcttcagcaattatacctacggtaacgacacggttaccgcgattgaattgggagatcgtactctggccgagaacatcttctccaattctccgattgaagatgtagaactggcgaaacatcgtgtccgcaaaggctccttttttgtgcaagacttggataccctgccgaactttacgtcggaagggtatggttcaattcgtcgtgtgtatgtttacggcgaagaagaccagatctttagccgcgattttcagttatggcaaattaataattataagcctgataaagtgtactgtgtaccgagtgctgaccacaagattatgatcagccgcgtcaacgagctggcccagattctccaagaagttgcaaactctgcgagtgatcttcttgcagtggct

SEQ ID NO: 1034 - protein, 263 aa, synthetic construct
  REGION 1..263: note = Round 4 (Selectivity)
MVSAHFILIHSVCHGAWLWYKLIPLLQSAGHNVTAIDLWASGMNPRQLEQIGTWEQYSEPLFTLIESIPEGKKVILVGESGGGINIALAAEKYPEKVSALVFVNALMPDIDHSPAFVYKKYSEVFTDWKDSIFSNYTYGNDTVTAIELGDRTLAENIFSNSPIEDVELAKHRVRKGSFFVQDLDTLPNFTSEGYGSIRRVYVYGEEDQIFSRDFQLWQINNYKPDKVYCVPSADHKIMISRVNELAQILQEVANSASDLLAVA

SEQ ID NO: 1035 - DNA, 789 bp, synthetic construct
  misc_feature 1..789: note = Round 4 (Activity)
  source 1..789: mol_type = other DNA
atggttagtgcgcattttattctgatccacagtgtttgccatggcgcctggctgtggtataaactgatcccgttattacagtctgcaggtcataacgttacggcgattgatctttgggctagcgggtcgaatcctcgccaactggaacagattggcacatgggagcagtactcagaaccattgttcaccctgatcgaatcgattccggaaggtaagaaagtcattctggtaggagaatcctttggcggcatcaatattgcactggccgcggagaaatatccggagaaagtgagcgccctcgtctttagcaacgcacttatgcccgatatcgatcacagtccagcgttcgtgtataagaaatatagcgaagttttcactgactggaaagattcgatcttcagcaattatacctacggtaacgacacggttaccgcggtggaattgggagatcgtactctggccgagaacatcttctccaattctccgattgaagatgtagaactggcgaaacatcgtgtccgcaaaggctccttttttgtgcaagacttggataccctgccgaactttacgtcggaagggtatggttcaattcgtcgtgtgtatgtttacggcgaagaagaccagatctttagccgcgattttcagttatggcaaattaataattataagcctgataaagtgtactgtgtaccgagtgctgaccacaagattatgatcagccgcgtcaacgagctggcccagattctccaagaagttgcaaactctgcgagtgatcttcttgcagtggct

SEQ ID NO: 1036 - protein, 263 aa, synthetic construct
  REGION 1..263: note = Round 4 (Activity)
MVSAHFILIHSVCHGAWLWYKLIPLLQSAGHNVTAIDLWASGSNPRQLEQIGTWEQYSEPLFTLIESIPEGKKVILVGESFGGINIALAAEKYPEKVSALVFSNALMPDIDHSPAFVYKKYSEVFTDWKDSIFSNYTYGNDTVTAVELGDRTLAENIFSNSPIEDVELAKHRVRKGSFFVQDLDTLPNFTSEGYGSIRRVYVYGEEDQIFSRDFQLWQINNYKPDKVYCVPSADHKIMISRVNELAQILQEVANSASDLLAVA

SEQ ID NO: 1037 - DNA, 789 bp, synthetic construct
  misc_feature 1..789: note = Round 4 (Activity)
  source 1..789: mol_type = other DNA
atggttagtgcgcattttattctgatccacagtgtttgccatggcgcctggctgtggtataaactgatcccgttattacagtctgcaggtcataacgttacggcgattgatctttgggctagcgggatgaatcctcgccaactggaacagattggcacatgggagcagtactcagaaccattgttcaccctgatcgaatcgattccggaaggtaagaaagtcattctggtaggagaatcctttggcggcatcaatattgcactggccgcggagaaatatccggagaaagtgagcgccctcgtctttagcaacgcacttatgcccgatatcgatcacagtccagcgttcgtgtataagaaatatagcgaagttttcactgactggaaagattcgatcttcagcaattatacctacggtaacgacacggttaccgcggtggaattgggagatcgtactctggccgagaacatcttctccaattctccgattgaagatgtagaactggcgaaacatcgtgtccgcaaaggctccttttttgagcaagacttggataccctgccgaactttacgtcggaagggtatggttcaattcgtcgtgtgtatgtttacggcgaagaagaccagatctttagccgcgattttcagttatggcaaattaataattataagcctgataaagtgtactgtgtaccgggggctgaccacaagattatgatcagccgcgtcaacgagctggcccagattctccaagaagttgcaaactctgcgagtgatcttcttgcagtggct

SEQ ID NO: 1038 - protein, 263 aa, synthetic construct
  REGION 1..263: note = Round 4 (Activity)
MVSAHFILIHSVCHGAWLWYKLIPLLQSAGHNVTAIDLWASGMNPRQLEQIGTWEQYSEPLFTLIESIPEGKKVILVGESFGGINIALAAEKYPEKVSALVFSNALMPDIDHSPAFVYKKYSEVFTDWKDSIFSNYTYGNDTVTAVELGDRTLAENIFSNSPIEDVELAKHRVRKGSFFEQDLDTLPNFTSEGYGSIRRVYVYGEEDQIFSRDFQLWQINNYKPDKVYCVPGADHKIMISRVNELAQILQEVANSASDLLAVA

SEQ ID NO: 1039 - DNA, 789 bp, synthetic construct
  misc_feature 1..789: note = Round 4 (Activity)
  source 1..789: mol_type = other DNA
atggttagtgcgcattttattctgatccacagtatttgccatggcgcctggctgtggtataaactgatcccgttattacagtctgcaggtcataacgttacggcgattgatctttgggctagcgggagtaatcctcgccaactggaacagattggcacatgggagcagtactcagaaccattgttcaccctgatcgaatcgattccggaaggtaagaaagtcattctggtaggagaatccggtggcggcatcaatattgcactggccgcggagaaatatccggagaaagtgagcgccctcgtctttagtaacgcacttatgcccgatatcgatcacagtccagcgttcgtgtataagaaatatagcgaagttttcactgactggaaagattcgatcttcagcaattatacctacggtaacgacacggttaccgcggtggaattgggagatcgtactctggccgagaacatcttctccaattctccgattgaagatgtagaactggcgaaacatcgtgtccgcaaaggctccttctttgagcaagacttggataccctgccgaactttacgtcggaagggtatggttcaattcgtcgtgtgtatgtttacggcgaagaagaccagatctttagccgcgattttcagttatggcaaattaataattataagcctgataaagtgtactgtgtaccgagtgctgaccacaagattatgatcagccgcgtcaacgagctggcccagattctccaagaagttgcaaactctgcgagtgatcttcttgcagtggct

SEQ ID NO: 1040 - protein, 263 aa, synthetic construct
  REGION 1..263: note = Round 4 (Activity)
MVSAHFILIHSICHGAWLWYKLIPLLQSAGHNVTAIDLWASGSNPRQLEQIGTWEQYSEPLFTLIESIPEGKKVILVGESGGGINIALAAEKYPEKVSALVFSNALMPDIDHSPAFVYKKYSEVFTDWKDSIFSNYTYGNDTVTAVELGDRTLAENIFSNSPIEDVELAKHRVRKGSFFEQDLDTLPNFTSEGYGSIRRVYVYGEEDQIFSRDFQLWQINNYKPDKVYCVPSADHKIMISRVNELAQILQEVANSASDLLAVA

SEQ ID NO: 1041 - DNA, 789 bp, synthetic construct
  misc_feature 1..789: note = Round 4 (Selectivity)
  source 1..789: mol_type = other DNA
atggttagtgcgcattttattctgatccacagtatttgccatggcgcctggctgtggtataaactgatcccgttattacagtctgcaggtcataacgttacggcgattgatctttgggctagcgggtcgaatcctcgccaactggaacagattggcacatgggagcagtactcagaaccattgttcacgctgatcgaatcgattccggaaggtaagaaagtcattctggtaggagaatccgggggcggcatcaatattgcactggccgcggagaaatatccggagaaagtgagcgccctcgtctttagcaacgcacttatgcccgatatcgatcacagtccagcgttcgtgtataagaaatatagcgaagttttcactgactggaaagattcgatcttcagcaattatacctacggtaacgacacggttaccgcgattgaattgggagatcgtactctggccgagaacatcttctccaattctccgattgaagatgtagaactggcgaaacatcgtgtccgcaaaggctccttttttctgcaagacttggataccctgccgaactttacgtcggaagggtatggttcaattcgtcgtgtgtatgtttacggcgaagaagaccagatctttagccgcgattttcagttatggcaaattaataattataagcctgataaagtgtactgtgtaccgagtgctgaccacaagattatgatcagccgcgtcaacgagctggcccagattctccaagaagttgcaaactctgcgagtgatcttcttgcagtggct

SEQ ID NO: 1042 - protein, 263 aa, synthetic construct
  REGION 1..263: note = Round 4 (Selectivity)
MVSAHFILIHSICHGAWLWYKLIPLLQSAGHNVTAIDLWASGSNPRQLEQIGTWEQYSEPLFTLIESIPEGKKVILVGESGGGINIALAAEKYPEKVSALVFSNALMPDIDHSPAFVYKKYSEVFTDWKDSIFSNYTYGNDTVTAIELGDRTLAENIFSNSPIEDVELAKHRVRKGSFFLQDLDTLPNFTSEGYGSIRRVYVYGEEDQIFSRDFQLWQINNYKPDKVYCVPSADHKIMISRVNELAQILQEVANSASDLLAVA

SEQ ID NO: 1043 - DNA, 789 bp, synthetic construct
  misc_feature 1..789: note = Round 4 (Activity)
  source 1..789: mol_type = other DNA
atggttagtgcgcattttattctgatccacagtatttgccatggcgcctggctgtggtataaactgatcccgttattacagtctgcaggtcataacgttacggcgattgatctttgggctagcgggagtaatcctcgccaactggaacagattggcacatgggagcagtactcagaaccattgttcaccctgatcgaatcgattccggaaggtaagaaagtcattctggtaggagaatccggtggcggcatcaatattgcactggccgcggagaaatatccggagaaagtgagcgccctcgtctttagtaacgcacttatgcccgatatcgatcacagtccagcgttcgtgtataagaaatatagcgaagttttcactgactggaaagattcgatcttcagcaattatacctacggtaacgacacggttaccgcggtggaattgggagatcgtactctggccgagaacatcttctccaattctccgattgaagatttggaactggcgaaacatcgtgtccgcaaaggctccttctttgagcaagacttggataccctgccgaactttacgtcggaagggtatggttcaattcgtcgtgtgtatgtttacggcgaagaagaccagatctttagccgcgattttcagttatggcaaattaataattataagcctgataaagtgtactgtgtaccgagtgctgaccacaagattatgatcagcaaggtcaacgagctggcccagattctccaagaagttgcaaactctgcgagtgatcttcttgcagtggct

SEQ ID NO: 1044 - protein, 263 aa, synthetic construct
  REGION 1..263: note = Round 4 (Activity)
MVSAHFILIHSICHGAWLWYKLIPLLQSAGHNVTAIDLWASGSNPRQLEQIGTWEQYSEPLFTLIESIPEGKKVILVGESGGGINIALAAEKYPEKVSALVFSNALMPDIDHSPAFVYKKYSEVFTDWKDSIFSNYTYGNDTVTAVELGDRTLAENIFSNSPIEDLELAKHRVRKGSFFEQDLDTLPNFTSEGYGSIRRVYVYGEEDQIFSRDFQLWQINNYKPDKVYCVPSADHKIMISKVNELAQILQEVANSASDLLAVA

SEQ ID NO: 1045 - DNA, 789 bp, synthetic construct
  misc_feature 1..789: note = Round 4 (Selectivity)
  source 1..789: mol_type = other DNA
atggttagtgcgcattttattctgatccacagtatttgccatggcgcctggctgtggtataaactgatcccgttattacagtctgcaggtcataacgttacggcgattgatctttgggctagcgggagtaatcctcgccaactggaacagattggcacatgggagcagtactcagaaccattgttcaccctgatcgaatcgattccggaaggtaagaaagtcattctggtaggagaatccggtggcggcatcaatattgcactggccgcggagaaatatccggagaaagtgagcgccctcgtctttagtaacgcacttatgcccgatatcgatcacagtccagcgttcgtgtataagaaatatagcgaagttttcactgactggaaagattcgatcttcagcaattatacctacggtaacgacacggttaccgcggtggaattgggagatcgtactctggccgagaacatcttctccaattctccgattgaagatgtagaactggcgaaacatctggtccgcaaaggctccttctttgagcaagacttggataccctgccgaactttacgtcggaagggtatggttcaattcgtcgtgtgtatgtttacggcgaagaagaccagatctttagccgcgattttcagttatggcaaattaataattataagcctgataaagtgtactgtgtaccgagtgctgaccacaagattatgatcagcaaggtcaacgagctggcccagattctccaagaagttgcaaactctgcgagtgatcttcttgcagtggct

SEQ ID NO: 1046 - protein, 263 aa, synthetic construct
  REGION 1..263: note = Round 4 (Selectivity)
MVSAHFILIHSICHGAWLWYKLIPLLQSAGHNVTAIDLWASGSNPRQLEQIGTWEQYSEPLFTLIESIPEGKKVILVGESGGGINIALAAEKYPEKVSALVFSNALMPDIDHSPAFVYKKYSEVFTDWKDSIFSNYTYGNDTVTAVELGDRTLAENIFSNSPIEDVELAKHLVRKGSFFEQDLDTLPNFTSEGYGSIRRVYVYGEEDQIFSRDFQLWQINNYKPDKVYCVPSADHKIMISKVNELAQILQEVANSASDLLAVA

SEQ ID NO: 1047 - DNA, 789 bp, synthetic construct
  misc_feature 1..789: note = Round 4 (Activity)
  source 1..789: mol_type = other DNA
atggttagtgcgcattttattctgatccacagtgtttgccatggcgcctggctgtggtataaactgatcccgttattacagtctgcaggtcataacgttacggcgattgatctttgggctagcgggagtaatcctcgccaactggaacagattggcacatgggagcagtactcagaaccattgttcaccctgatcgaatcgattccggaaggtaagaaagtcattctggtaggagaatccgggggcggcatcaatattgcactggccgcggagaaatatccggagaaagtgagcgccctcgtctttagtaacgcacttatgcccgatatcgatcacagtccagcgttcgtgtataagaaatatagcgaagttttcactgactggaaagattcgatcttcagcaattatacctacggtaacgacacggttaccgcggtggaattgggagatcgtactctggccgagaacatcttctccaattctccgattgaagatgtagaactggcgaaacatcgtgtccgcaaaggctccttttttgagcaagacttggataccctgccgaactttacgtcggaagggtatggttcaattcgtcgtgtgtatgtttacggcgaagaagaccagatctttagccgcgattttcagttatggcaaattaataattataagcctgataaagtgtactgtgtaccgagtgctgaccacaagattatgatcagccgcgtcaacgagctggcccagattctccaagaagttgcaaactctgcgagtgatcttcttgcagtggct

SEQ ID NO: 1048 - protein, 263 aa, synthetic construct
  REGION 1..263: note = Round 4 (Activity)
MVSAHFILIHSVCHGAWLWYKLIPLLQSAGHNVTAIDLWASGSNPRQLEQIGTWEQYSEPLFTLIESIPEGKKVILVGESGGGINIALAAEKYPEKVSALVFSNALMPDIDHSPAFVYKKYSEVFTDWKDSIFSNYTYGNDTVTAVELGDRTLAENIFSNSPIEDVELAKHRVRKGSFFEQDLDTLPNFTSEGYGSIRRVYVYGEEDQIFSRDFQLWQINNYKPDKVYCVPSADHKIMISRVNELAQILQEVANSASDLLAVA

SEQ ID NO: 1049 - DNA, 789 bp, synthetic construct
  misc_feature 1..789: note = Round 4 (Activity)
  source 1..789: mol_type = other DNA
atggttagtgcgcattttattctgatccacagtatttgccatggcgcctggctgtggtataaactgatcccgttattacagtctgcaggtcataacgttacggcgattgatctttgggctagcgggagtaatcctcgccaactggaacagattggcacatgggagcagtactcagaaccattgttcaccctgatcgaatcgattccggaaggtaagaaagtcattctggtaggagaatccggtggcggcatcaatattgcactggccgcggagaaatatccggagaaagtgagcgccctcgtctttagcaacgcacttatgcccgatatcgatcacagtccagcgttcgtgtataagaaatatagcgaagttttcactgactggaaagattcgatcttcagcaattatacctacggtaacgacacggttaccgcgattgaattgggagatcgtactctggccgagaacatcttctccaattctccgattgaagatgtagaactggcgaaacatcgtgtccgcaaaggctccttctttgagcaagacttggataccctgccgaactttacgtcggaagggtatggttcaattcgtcgtgtgtatgtttacggcgaagaagaccagatctttagccgcgattttcagttatggcaaattaataattataagcctgataaagtgtactgtgtaccgagtgctgaccacaagattatgatcagccgcgtcaacgagctggcccagattctccaagaagttgcaaactctgcgagtgatcttcttgcagtggct

SEQ ID NO: 1050 - protein, 263 aa, synthetic construct
  REGION 1..263: note = Round 4 (Activity)
MVSAHFILIHSICHGAWLWYKLIPLLQSAGHNVTAIDLWASGSNPRQLEQIGTWEQYSEPLFTLIESIPEGKKVILVGESGGGINIALAAEKYPEKVSALVFSNALMPDIDHSPAFVYKKYSEVFTDWKDSIFSNYTYGNDTVTAIELGDRTLAENIFSNSPIEDVELAKHRVRKGSFFEQDLDTLPNFTSEGYGSIRRVYVYGEEDQIFSRDFQLWQINNYKPDKVYCVPSADHKIMISRVNELAQILQEVANSASDLLAVA

SEQ ID NO: 1051 - DNA, 789 bp, synthetic construct
  misc_feature 1..789: note = Round 4 (Selectivity)
  source 1..789: mol_type = other DNA
atggttagtgcgcattttattctgatccacagtatttgccatggcgcctggctgtggtataaactgatcccgttattacagtctgcaggtcataacgttacggcgattgatctttgggctagcgggtcgaatcctcgccaactggaacagattggcacatgggagcagtactcagaaccattgttcaccctgatcgaatcgattccggaaggtaagaaagtcattctggtaggagaatccgggggcggcatcaatattgcactggccgcggagaaatatccggagaaagtgagcgccctcgtctttctgaacgcacttatgcccgatatcgatcacagtccagcgttcgtgtataagaaatatagcgaagttttcactgactggaaagattcgatcttcagcaattatacctacggtaacgacacggttaccgcggtggaattgggagatcgtactctggccgagaacatcttctccaattctccgattgaagatgtagaactggcgaaacatcgtgtccgcaaaggctccttttttctgcaagacttggataccctgccgaactttacgtcggaagggtatggttcaattcgtcgtgtgtatgtttacggcgaagaagaccagatctttagccgcgattttcagttatggcaaattaataattataagcctgataaagtgtactgtgtaccgagtgctgaccacaagattatgatcagcaaagtcaacgagctggcccagattctccaagaagttgcaaactctgcgagtgatcttcttgcagtggct

SEQ ID NO: 1052 - protein, 263 aa, synthetic construct
  REGION 1..263: note = Round 4 (Selectivity)
MVSAHFILIHSICHGAWLWYKLIPLLQSAGHNVTAIDLWASGSNPRQLEQIGTWEQYSEPLFTLIESIPEGKKVILVGESGGGINIALAAEKYPEKVSALVFLNALMPDIDHSPAFVYKKYSEVFTDWKDSIFSNYTYGNDTVTAVELGDRTLAENIFSNSPIEDVELAKHRVRKGSFFLQDLDTLPNFTSEGYGSIRRVYVYGEEDQIFSRDFQLWQINNYKPDKVYCVPSADHKIMISKVNELAQILQEVANSASDLLAVA

SEQ ID NO: 1053 - DNA, 789 bp, synthetic construct
  misc_feature 1..789: note = Round 4 (Selectivity)
  source 1..789: mol_type = other DNA
atggttagtgcgcattttattctgatccacagtatttgccatggcgcctggctgtggtataaactgatcccgttattacagtctgcaggtcataacgttacggcgattgatctttgggctagcgggtcgaatcctcgccaactggaacagattggcacatgggagcagtactcagaaccattgttcccgctgatcgaatcgattccggaaggtaagaaagtcattctggtaggagaatccgggggcggcatcaatattgcactggccgcggagaaatatccggagaaagtgagcgccctcgtctttctgaacgcacttatgcccgatatcgatcacagtccagcgttcgtgtataagaaatatagcgaagttttcactgactggaaagattcgatcttcagcaattatacctacggtaacgacacggttaccgcggtggaattgggagatcgtactctggccgagaacatcttctccaattctccgattgaagatgtagaactggcgaaacatcgtgtccgcaaaggctccttttttctgcaagacttggataccctgccgaactttacgtcggaagggtatggttcaattcgtcgtgtgtatgtttacggcgaagaagaccagatctttagccgcgattttcagttatggcaaattaataattataagcctgataaagtgtactgtgtaccgggggctgaccacaagattatgatcagcaaagtcaacgagctggcccagattctccaagaagttgcaaactctgcgagtgatcttcttgcagtggct

SEQ ID NO: 1054 - protein, 263 aa, synthetic construct
  REGION 1..263: note = Round 4 (Selectivity)
MVSAHFILIHSICHGAWLWYKLIPLLQSAGHNVTAIDLWASGSNPRQLEQIGTWEQYSEPLFPLIESIPEGKKVILVGESGGGINIALAAEKYPEKVSALVFLNALMPDIDHSPAFVYKKYSEVFTDWKDSIFSNYTYGNDTVTAVELGDRTLAENIFSNSPIEDVELAKHRVRKGSFFLQDLDTLPNFTSEGYGSIRRVYVYGEEDQIFSRDFQLWQINNYKPDKVYCVPGADHKIMISKVNELAQILQEVANSASDLLAVA

SEQ ID NO: 1055 - DNA, 789 bp, synthetic construct
  misc_feature 1..789: note = Round 4 (Activity)
  source 1..789: mol_type = other DNA
atggttagtgcgcattttattctgatccacagtatttgccatggcgcctggctgtggtataaactgatcccgttattacagtctgcaggtcataacgttacggcgattgatctttgggctagcgggagtaatcctcgccaactggaacagattggcacatgggagcagtactcagaaccattgttcaccctgatcgaatcgattccggaaggtaagaaagtcattctggtaggagaatccggtggcggcatcaatattgcactggccgcggagaaatatccggagaaagtgagcgccctcgtctttaataacgcacttatgcccgatatcgatcacagtccagcgttcgtgtataagaaatatagcgaagttttcactgactggaaagattcgatcttcagcaattatacctacggtaacgacacggttaccgcggtggaattgggagatcgtactctggccgagaacatcttctccaattctccgattgaagatgtagaactggcgaaacatcgtgtccgcaaaggctccttctttgagcaagacttggataccctgccgaactttacgtcggaagggtatggttcaattcgtcgtgtgtatgtttacggcgaagaagaccagatctttagccgcgattttcagttatggcaaattaataattataagcctgataaagtgtactgtgtaccgagtgctgaccacaagattatgatcagcaaggtcaacgagctggcccagattctccaagaagttgcaaactctgcgagtgatcttcttgcagtggct

SEQ ID NO: 1056 - protein, 263 aa, synthetic construct
  REGION 1..263: note = Round 4 (Activity)
MVSAHFILIHSICHGAWLWYKLIPLLQSAGHNVTAIDLWASGSNPRQLEQIGTWEQYSEPLFTLIESIPEGKKVILVGESGGGINIALAAEKYPEKVSALVFNNALMPDIDHSPAFVYKKYSEVFTDWKDSIFSNYTYGNDTVTAVELGDRTLAENIFSNSPIEDVELAKHRVRKGSFFEQDLDTLPNFTSEGYGSIRRVYVYGEEDQIFSRDFQLWQINNYKPDKVYCVPSADHKIMISKVNELAQILQEVANSASDLLAVA

SEQ ID NO: 1057 - DNA, 789 bp, synthetic construct
  misc_feature 1..789: note = Round 4 (Activity)
  source 1..789: mol_type = other DNA
atggttagtgcgcattttattctgatccacagtatttgccatggcgcctggctgtggtataaactgatcccgttattacagtctgcaggtcataacgttacggcgattgatctttgggctagcgggatgaatcctcgccaactggaacagattggcacatgggagcagtactcagaaccattgttcaccctgatcgaatcgattccggaaggtaagaaagtcattctggtaggagaatcctttggcggcatcaatattgcactggccgcggagaaatatccggagaaagtgagcgccctcgtctttagcaacgcacttatgcccgatatcgatcacagtccagcgttcgtgtataagaaatatagcgaagttttcactgactggaaagattcgatcttcagcaattatacctacggtaacgacacggttaccgcggtggaattgggagatcgtactctggccgagaacatcttctccaattctccgattgaagatgtagaactggcgaaacatcgtgtccgcaaaggctccttttttgagcaagacttggataccctgccgaactttacgtcggaagggtatggttcaattcgtcgtgtgtatgtttacggcgaagaagaccagatctttagccgcgattttcagttatggcaaattaataattataagcctgataaagtgtactgtgtaccgggggctgaccacaagattatgatcagccgcgtcaacgagctggcccagattctccaagaagttgcaaactctgcgagtgatcttcttgcagtggct

SEQ ID NO: 1058 - protein, 263 aa, synthetic construct
  REGION 1..263: note = Round 4 (Activity)
MVSAHFILIHSICHGAWLWYKLIPLLQSAGHNVTAIDLWASGMNPRQLEQIGTWEQYSEPLFTLIESIPEGKKVILVGESFGGINIALAAEKYPEKVSALVFSNALMPDIDHSPAFVYKKYSEVFTDWKDSIFSNYTYGNDTVTAVELGDRTLAENIFSNSPIEDVELAKHRVRKGSFFEQDLDTLPNFTSEGYGSIRRVYVYGEEDQIFSRDFQLWQINNYKPDKVYCVPGADHKIMISRVNELAQILQEVANSASDLLAVA

SEQ ID NO: 1059 - DNA, 789 bp, synthetic construct
  misc_feature 1..789: note = Round 4 (Activity)
  source 1..789: mol_type = other DNA
atggttagtgcgcattttattctgatccacagtatttgccatggcgcctggctgtggtataaactgatcccgttattacagtctgcaggtcataacgttacggcgattgatctttgggctagcgggtcgaatcctcgccaactggaacagattggcacatgggagcagtactcagaaccattgttcacgctgatcgaatcgattccggaaggtaagaaagtcattctggtaggagaatccggtggcggcatcaatattgcactggccgcggagaaatatccggagaaagtgagcgccctcgtctttctgaacgcacttatgcccgatatcgatcacagtccagcgttcgtgtataagaaatatagcgaagttttcactgactggaaagattcgatcttcagcaattatacctacggtaacgacacggttaccgcggtggaattgggagatcgtactctggccgagaacatcttctccaattctccgattgaagatgtagaactggcgaaacatcgtgtccgcaaaggctccttttttgtgcaagacttggataccctgccgaactttacgtcggaagggtatggttcaattcgtcgtgtgtatgtttacggcgaagaagaccagatctttagccgcgattttcagttatggcaaattaataattataagcctgataaagtgtactgtgtaccgagtgctgaccacaagattatgatcagccgcgtcaacgagctggcccagattctccaagaagttgcaaactctgcgagtgatcttcttgcagtggct

SEQ ID NO: 1060 - protein, 263 aa, synthetic construct
  REGION 1..263: note = Round 4 (Activity)
MVSAHFILIHSICHGAWLWYKLIPLLQSAGHNVTAIDLWASGSNPRQLEQIGTWEQYSEPLFTLIESIPEGKKVILVGESGGGINIALAAEKYPEKVSALVFLNALMPDIDHSPAFVYKKYSEVFTDWKDSIFSNYTYGNDTVTAVELGDRTLAENIFSNSPIEDVELAKHRVRKGSFFVQDLDTLPNFTSEGYGSIRRVYVYGEEDQIFSRDFQLWQINNYKPDKVYCVPSADHKIMISRVNELAQILQEVANSASDLLAVA

SEQ ID NO: 1061 - DNA, 789 bp, synthetic construct
  misc_feature 1..789: note = Round 4 (Selectivity)
  source 1..789: mol_type = other DNA
atggttagtgcgcattttattctgatccacagtatttgccatggcgcctggctgtggtataaactgatcccgttattacagtctgcaggtcataacgttacggcgattgatctttgggctagcgggagtaatcctcgccaactggaacagattggcacatgggagcagtactcagaaccattgttcacgctgatcgaatcgattccggaaggtaagaaagtcattctggtaggagaatccgggggcggcatcaatattgcactggccgcggagaaatatccggagaaagtgagcgccctcgtctttctgaacgcacttatgcccgatatcgatcacagtccagcgttcgtgtataagaaatatagcgaagttttcactgactggaaagattcgatcttcagcaattatacctacggtaacgacacggttaccgcgattgaattgggagatcgtactctggccgagaacatcttctccaattctccgattgaagatgtagaactggcgaaacatcgtgtccgcaaaggctccttttttgtgcaagacttggataccctgccgaactttacgtcggaagggtatggttcaattcgtcgtgtgtatgtttacggcgaagaagaccagatctttagccgcgattttcagttatggcaaattaataattataagcctgataaagtgtactgtgtaccgagtgctgaccacaagattatgatcagcaaagtcaacgagctggcccagattctccaagaagttgcaaactctgcgagtgatcttcttgcagtggct

SEQ ID NO: 1062 - protein, 263 aa, synthetic construct
  REGION 1..263: note = Round 4 (Selectivity)
MVSAHFILIHSICHGAWLWYKLIPLLQSAGHNVTAIDLWASGSNPRQLEQIGTWEQYSEPLFTLIESIPEGKKVILVGESGGGINIALAAEKYPEKVSALVFLNALMPDIDHSPAFVYKKYSEVFTDWKDSIFSNYTYGNDTVTAIELGDRTLAENIFSNSPIEDVELAKHRVRKGSFFVQDLDTLPNFTSEGYGSIRRVYVYGEEDQIFSRDFQLWQINNYKPDKVYCVPSADHKIMISKVNELAQILQEVANSASDLLAVA

SEQ ID NO: 1063 - DNA, 789 bp, synthetic construct
  misc_feature 1..789: note = Round 4 (Activity)
  source 1..789: mol_type = other DNA
atggttagtgcgcattttattctgatccacagtatttgccatggcgcctggctgtggtataaactgatcccgttattacagtctgcaggtcataacgttacggcgattgatctttgggctagcgggtcgaatcctcgccaactggaacagattggcacatgggagcagtactcagaaccattgttcacgctgatcgaatcgattccggaaggtaagaaagtcattctggtaggagaatccgggggcggcatcaatattgcactggccgcggagaaatatccggagaaagtgagcgccctcgtctttctgaacgcacttatgcccgatatcgatcacagtccagcgttcgtgtataagaaatatagcgaagttttcactgactggaaagattcgatcttcagcaattatacctacggtaacgacacggttaccgcgattgaattgggagatcgtactctggccgagaacatcttctccaattctccgattgaagatgtagaactggcgaaacatcgtgtccgcaaaggctccttttttgagcaagacttggataccctgccgaactttacgtcggaagggtatggttcaattcgtcgtgtgtatgtttacggcgaagaagaccagatctttagccgcgattttcagttatggcaaattaataattataagcctgataaagtgtactgtgtaccgagtgctgaccacaagattatgatcagcaaggtcaacgagctggcccagattctccaagaagttgcaaactctgcgagtgatcttcttgcagtggct

SEQ ID NO: 1064 - protein, 263 aa, synthetic construct
  REGION 1..263: note = Round 4 (Activity)
MVSAHFILIHSICHGAWLWYKLIPLLQSAGHNVTAIDLWASGSNPRQLEQIGTWEQYSEPLFTLIESIPEGKKVILVGESGGGINIALAAEKYPEKVSALVFLNALMPDIDHSPAFVYKKYSEVFTDWKDSIFSNYTYGNDTVTAIELGDRTLAENIFSNSPIEDVELAKHRVRKGSFFEQDLDTLPNFTSEGYGSIRRVYVYGEEDQIFSRDFQLWQINNYKPDKVYCVPSADHKIMISKVNELAQILQEVANSASDLLAVA

SEQ ID NO: 1065 - DNA, 789 bp, synthetic construct
  misc_feature 1..789: note = Round 4 (Activity)
  source 1..789: mol_type = other DNA
atggttagtgcgcattttattctgatccacagtgtttgccatggcgcctggctgtggtataaactgatcccgttattacagtctgcaggtcataacgttacggcgattgatctttgggctagcgggtcgaatcctcgccaactggaacagattggcacatgggagcagtactcagaaccattgttcaccctgatcgaatcgattccggaaggtaagaaagtcattctggtaggagaatcctttggcggcatcaatattgcactggccgcggagaaatatccggagaaagtgagcgccctcgtctttagcaacgcacttatgcccgatatcgatcacagtccagcgttcgtgtataagaaatatagcgaagttttcactgactggaaagattcgatcttcagcaattatacctacggtaacgacacggttaccgcggtggaattgggagatcgtactctggccgagaacatcttctccaattctccgattgaagatgtagaactggcgaaacatcgtgtccgcaaaggctccttctttgagcaagacttggataccctgccgaactttacgtcggaagggtatggttcaattcgtcgtgtgtatgtttacggcgaagaagaccagatctttagccgcgattttcagttatggcaaattaataattataagcctgataaagtgtactgtgtaccgagtgctgaccacaagattatgatcagcaaagtcaacgagctggcccagattctccaagaagttgcaaactctgcgagtgatcttcttgcagtggct

SEQ ID NO: 1066 - protein, 263 aa, synthetic construct
  REGION 1..263: note = Round 4 (Activity)
MVSAHFILIHSVCHGAWLWYKLIPLLQSAGHNVTAIDLWASGSNPRQLEQIGTWEQYSEPLFTLIESIPEGKKVILVGESFGGINIALAAEKYPEKVSALVFSNALMPDIDHSPAFVYKKYSEVFTDWKDSIFSNYTYGNDTVTAVELGDRTLAENIFSNSPIEDVELAKHRVRKGSFFEQDLDTLPNFTSEGYGSIRRVYVYGEEDQIFSRDFQLWQINNYKPDKVYCVPSADHKIMISKVNELAQILQEVANSASDLLAVA

SEQ ID NO: 1067 - DNA, 789 bp, synthetic construct
  misc_feature 1..789: note = Round 4 (Selectivity)
  source 1..789: mol_type = other DNA
atggttagtgcgcattttattctgatccacagtatttgccatggcgcctggctgtggtataaactgatcccgttattacagtctgcaggtcataacgttacggcgattgatctttgggctagcgggagtaatcctcgccaactggaacagattggcacatgggagcagtactcagaaccattgttcaccctgatcgaatcgattccggaaggtaagaaagtcattctggtaggagaatccggtggcggcatcaatattgcactggccgcggagaaatatccggagaaagtgagcgccctcgtctttttgaacgcacttatgcccgatatcgatcacagtccagcgttcgtgtataagaaatatagcgaagttttcactgactggaaagattcgatcttcagcaattatacctacggtaacgacacggttaccgcggtggaattgggagatcgtactctggccgagaacatcttctccaattctccgattgaagatgtagaactggcgaaacatcgtgtccgcaaaggctccttctttgagcaagacttggataccctgccgaactttacgtcggaagggtatggttcaattcgtcgtgtgtatgtttacggcgaagaagaccagatctttagccgcgattttcagttatggcaaattaataattataagcctgataaagtgtactgtgtaccgagtgctgaccacaagattatgatcagcaaggtcaacgagctggcccagattctccaagaagttgcaaactctgcgagtgatcttcttgcagtggct

SEQ ID NO: 1068 - protein, 263 aa, synthetic construct
  REGION 1..263: note = Round 4 (Selectivity)
MVSAHFILIHSICHGAWLWYKLIPLLQSAGHNVTAIDLWASGSNPRQLEQIGTWEQYSEPLFTLIESIPEGKKVILVGESGGGINIALAAEKYPEKVSALVFLNALMPDIDHSPAFVYKKYSEVFTDWKDSIFSNYTYGNDTVTAVELGDRTLAENIFSNSPIEDVELAKHRVRKGSFFEQDLDTLPNFTSEGYGSIRRVYVYGEEDQIFSRDFQLWQINNYKPDKVYCVPSADHKIMISKVNELAQILQEVANSASDLLAVA

SEQ ID NO: 1069 - DNA, 789 bp, synthetic construct
  misc_feature 1..789: note = Round 4 (Selectivity)
  source 1..789: mol_type = other DNA
atggttagtgcgcattttattctgatccacagtgtttgccatggcgcctggctgtggtataaactgatcccgttattacagtctgcaggtcataacgttacggcgattgatctttgggctagcgggtcgaatcctcgccaactggaacagattggcacatgggagcagtactcagaaccattgttcacgctgatcgaatcgattccggaaggtaagaaagtcattctggtaggagaatccgggggcggcatcaatattgcactggccgcggagaaatatccggagaaagtgagcgccctcgtctttctgaacgcacttatgcccgatatcgatcacagtccagcgttcgtgtataagaaatatagcgaagttttcactgactggaaagattcgatcttcagcaattatacctacggtaacgacacggttaccgcggtggaattgggagatcgtactctggccgagaacatcttctccaattctccgattgaagatgtagaactggcgaaacatcgtgtccgcaaaggctccttttttctgcaagacttggataccctgccgaactttacgtcggaagggtatggttcaattcgtcgtgtgtatgtttacggcgaagaagaccagatctttagccgcgattttcagttatggcaaattaataattataagcctgataaagtgtactgtgtaccgagtgctgaccacaagattatgatcagccgcgtcaacgagctggcccagattctccaagaagttgcaaactctgcgagtgatcttcttgcagtggct

SEQ ID NO: 1070 - protein, 263 aa, synthetic construct
  REGION 1..263: note = Round 4 (Selectivity)
MVSAHFILIHSVCHGAWLWYKLIPLLQSAGHNVTAIDLWASGSNPRQLEQIGTWEQYSEPLFTLIESIPEGKKVILVGESGGGINIALAAEKYPEKVSALVFLNALMPDIDHSPAFVYKKYSEVFTDWKDSIFSNYTYGNDTVTAVELGDRTLAENIFSNSPIEDVELAKHRVRKGSFFLQDLDTLPNFTSEGYGSIRRVYVYGEEDQIFSRDFQLWQINNYKPDKVYCVPSADHKIMISRVNELAQILQEVANSASDLLAVA

SEQ ID NO: 1071 - DNA, 789 bp, synthetic construct
  misc_feature 1..789: note = Round 4 (Activity)
  source 1..789: mol_type = other DNA
atggttagtgcgcattttattctgatccacagtatttgccatggcgcctggctgtggtataaactgatcccgttattacagtctgcaggtcataacgttacggcgattgatctttgggctagcgggtcgaatcctcgccaactggaacagattggcacatgggagcagtactcagaaccattgttcaccctgatcgaatcgattccggaaggtaagaaagtcattctggtaggagaatcctttggcggcatcaatattgcactggccgcggagaaatatccggagaaagtgagcgccctcgtctttagtaacgcacttatgcccgatatcgatcacagtccagcgttcgtgtataagaaatatagcgaagttttcactgactggaaagattcgatcttcagcaattatacctacggtaacgacacggttaccgcggtggaattgggagatcgtactctggccgagaacatcttctccaattctccgattgaagatgtagaactggcgaaacatcgtgtccgcaaaggctccttttttctgcaagacttggataccctgccgaactttacgtcggaagggtatggttcaattcgtcgtgtgtatgtttacggcgaagaagaccagatctttagccgcgattttcagttatggcaaattaataattataagcctgataaagtgtactgtgtaccgagtgctgaccacaagattatgatcagccgcgtcaacgagctggcccagattctccaagaagttgcaaactctgcgagtgatcttcttgcagtggct

SEQ ID NO: 1072 - protein, 263 aa, synthetic construct
  REGION 1..263: note = Round 4 (Activity)
MVSAHFILIHSICHGAWLWYKLIPLLQSAGHNVTAIDLWASGSNPRQLEQIGTWEQYSEPLFTLIESIPEGKKVILVGESFGGINIALAAEKYPEKVSALVFSNALMPDIDHSPAFVYKKYSEVFTDWKDSIFSNYTYGNDTVTAVELGDRTLAENIFSNSPIEDVELAKHRVRKGSFFLQDLDTLPNFTSEGYGSIRRVYVYGEEDQIFSRDFQLWQINNYKPDKVYCVPSADHKIMISRVNELAQILQEVANSASDLLAVA

SEQ ID NO: 1073 - DNA, 789 bp, synthetic construct
  misc_feature 1..789: note = Round 4 (Activity)
  source 1..789: mol_type = other DNA
atggttagtgcgcattttattctgatccacagtatttgccatggcgcctggctgtggtataaactgatcccgttattacagtctgcaggtcataacgttacggcgattgatctttgggctagcgggagtaatcctcgccaactggaacagattggcacatgggagcagtactcagaaccattgttcaccctgatcgaatcgattccggaaggtaagaaagtcattctggtaggagaatccggtggcggcatcaatattgcactggccgcggagaaatatccggagaaagtgagcgccctcgtctttagtaacgcacttatgcccgatatcgatcacagtccagcgttcgtgtataagaaatatagcgaagttttcactgactggaaagattcgatcttcagcaattatacctacggtaacgacacggttaccgtggtggaattgggagatcgtactctggccgagaacatcttctccaattctccgattgaagatgtagaactggcgaaacatcgtgtccgcaaaggctccttctttgagcaagacttggataccctgccgaactttacgtcggaagggtatggttcaattcgtcgtgtgtatgtttacggcgaagaagaccagatctttagccgcgattttcagttatggcaaattaataattataagcctgataaagtgtactgtgtaccgagtgctgaccacaagattatgatcagcaaggtcaacgagctggcccagattctccaagaagttgcaaactctgcgagtgatcttcttgcagtggct

SEQ ID NO: 1074 - protein, 263 aa, synthetic construct
  REGION 1..263: note = Round 4 (Activity)
MVSAHFILIHSICHGAWLWYKLIPLLQSAGHNVTAIDLWASGSNPRQLEQIGTWEQYSEPLFTLIESIPEGKKVILVGESGGGINIALAAEKYPEKVSALVFSNALMPDIDHSPAFVYKKYSEVFTDWKDSIFSNYTYGNDTVTVVELGDRTLAENIFSNSPIEDVELAKHRVRKGSFFEQDLDTLPNFTSEGYGSIRRVYVYGEEDQIFSRDFQLWQINNYKPDKVYCVPSADHKIMISKVNELAQILQEVANSASDLLAVA

SEQ ID NO: 1075 - DNA, 789 bp, synthetic construct
  misc_feature 1..789: note = Round 4 (Activity)
  source 1..789: mol_type = other DNA
atggttagtgcgcattttattctgatccacagtgtttgccatggcgcctggctgtggtataaactgatcccgttattacagtctgcaggtcataacgttacggcgattgatctttgggctagcgggtcgaatcctcgccaactggaacagattggcacatgggagcagtactcagaaccattgttcacgctgatcgaatcgattccggaaggtaagaaagtcattctggtaggagaatccggtggcggcatcaatattgcactggccgcggagaaatatccggagaaagtgagcgccctcgtctttagcaacgcacttatgcccgatatcgatcacagtccagcgttcgtgtataagaaatatagcgaagttttcactgactggaaagattcgatcttcagcaattatacctacggtaacgacacggttaccgcggtggaattgggagatcgtactctggccgagaacatcttctccaattctccgattgaagatgtagaactggcgaaacatcgtgtccgcaaaggctccttttttgagcaagacttggataccctgccgaactttacgtcggaagggtatggttcaattcgtcgtgtgtatgtttacggcgaagaagaccagatctttagccgcgattttcagttatggcaaattaataattataagcctgataaagtgtactgtgtaccgagtgctgaccacaagattatgatcagcaaagtcaacgagctggcccagattctccaagaagttgcaaactctgcgagtgatcttcttgcagtggct

SEQ ID NO: 1076 - protein, 263 aa, synthetic construct
  REGION 1..263: note = Round 4 (Activity)
MVSAHFILIHSVCHGAWLWYKLIPLLQSAGHNVTAIDLWASGSNPRQLEQIGTWEQYSEPLFTLIESIPEGKKVILVGESGGGINIALAAEKYPEKVSALVFSNALMPDIDHSPAFVYKKYSEVFTDWKDSIFSNYTYGNDTVTAVELGDRTLAENIFSNSPIEDVELAKHRVRKGSFFEQDLDTLPNFTSEGYGSIRRVYVYGEEDQIFSRDFQLWQINNYKPDKVYCVPSADHKIMISKVNELAQILQEVANSASDLLAVA

SEQ ID NO: 1077 - DNA, 789 bp, synthetic construct
  misc_feature 1..789: note = Round 4 (Selectivity)
  source 1..789: mol_type = other DNA
atggttagtgcgcattttattctgatccacagtgtttgccatggcgcctggctgtggtataaactgatcccgttattacagtctgcaggtcataacgttacggcgattgatctttgggctagcgggtcgaatcctcgccaactggaacagattggcacatgggagcagtactcagaaccattgttcacgctgatcgaatcgattccggaaggtaagaaagtcattctggtaggagaatccgggggcggcatcaatattgcactggccgcggagaaatatccggagaaagtgagcgccctcgtctttagcaacgcacttatgcccgatatcgatcacagtccagcgttcgtgtataagaaatatagcgaagttttcactgactggaaagattcgatcttcagcaattatacctacggtaacgacacggttaccgcgattgaattgggagatcgtactctggccgagaacatcttctccaattctccgattgaagatgtagaactggcgaaacatcgtgtccgcaaaggctccttttttctgcaagacttggataccctgccgaactttacgtcggaagggtatggttcaattcgtcgtgtgtatgtttacggcgaagaagaccagatctttagccgcgattttcagttatggcaaattaataattataagcctgataaagtgtactgtgtaccgagtgctgaccacaagattatgatcagccgcgtcaacgagctggcccagattctccaagaagttgcaaactctgcgagtgatcttcttgcagtggct

SEQ ID NO: 1078 - protein, 263 aa, synthetic construct
  REGION 1..263: note = Round 4 (Selectivity)
MVSAHFILIHSVCHGAWLWYKLIPLLQSAGHNVTAIDLWASGSNPRQLEQIGTWEQYSEPLFTLIESIPEGKKVILVGESGGGINIALAAEKYPEKVSALVFSNALMPDIDHSPAFVYKKYSEVFTDWKDSIFSNYTYGNDTVTAIELGDRTLAENIFSNSPIEDVELAKHRVRKGSFFLQDLDTLPNFTSEGYGSIRRVYVYGEEDQIFSRDFQLWQINNYKPDKVYCVPSADHKIMISRVNELAQILQEVANSASDLLAVA

SEQ ID NO: 1079 - DNA, 789 bp, synthetic construct
  misc_feature 1..789: note = Round 4 (Activity)
  source 1..789: mol_type = other DNA
atggttagtgcgcattttattctgatccacagtatttgccatggcgcctggctgtggtataaactgatcccgttattacagtctgcaggtcataacgttacggcgattgatctttgggctagcgggatgaatcctcgccaactggaacagattggcacatgggagcagtactcagaaccattgttcaccctgatcgaatcgattccggaaggtaagaaagtcattctggtaggagaatccggtggcggcatcaatattgcactggccgcggagaaatatccggagaaagtgagcgccctcgtctttagtaacgcacttatgcccgatatcgatcacagtccagcgttcgtgtataagaaatatagcgaagttttcactgactggaaagattcgatcttcagcaattatacctacggtaacgacacggttaccgcggtggaattgggagatcgtactctggccgagaacatcttctccaattctccgattgaagatgtagaactggcgaaacatcgtgtccgcaaaggctccttttttgagcaagacttggataccctgccgaactttacgtcggaagggtatggttcaattcgtcgtgtgtatgtttacggcgaagaagaccagatctttagccgcgattttcagttatggcaaattaataattataagcctgataaagtgtactgtgtaccgggggctgaccacaagattatgatcagccgcgtcaacgagctggcccagattctccaagaagttgcaaactctgcgagtgatcttcttgcagtggct

SEQ ID NO: 1080 - protein, 263 aa, synthetic construct
  REGION 1..263: note = Round 4 (Activity)
MVSAHFILIHSICHGAWLWYKLIPLLQSAGHNVTAIDLWASGMNPRQLEQIGTWEQYSEPLFTLIESIPEGKKVILVGESGGGINIALAAEKYPEKVSALVFSNALMPDIDHSPAFVYKKYSEVFTDWKDSIFSNYTYGNDTVTAVELGDRTLAENIFSNSPIEDVELAKHRVRKGSFFEQDLDTLPNFTSEGYGSIRRVYVYGEEDQIFSRDFQLWQINNYKPDKVYCVPGADHKIMISRVNELAQILQEVANSASDLLAVA

SEQ ID NO: 1081 - DNA, 789 bp, synthetic construct
  misc_feature 1..789: note = Round 4 (Selectivity)
  source 1..789: mol_type = other DNA
atggttagtgcgcattttattctgatccacagtatttgccatggcgcctgggtgtggtataaactgatcccgttattacagtctgcaggtcataacgttacggcgattgatctttgggctagcgggagtaatcctcgccaactggaacagattggcacatgggagcagtactcagaaccattgttcaccctgatcgaatcgattccggaaggtaagaaagtcattctggtaggagaatccggtggcggcatcaatattgcactggccgcggagaaatatccggagaaagtgagcgccctcgtctttagtaacgcacttatgcccgatatcgatcacagtccagcgttcgtgtataagaaatatagcgaagttttcactgactggaaagattcgatcttcagcaattatacctacggtaacgacacggttaccgcggtggaattgggagatcgtactctggccgagaacatcttctccaattctccgattgaagatgtagaactggcgaaacatcgtgtccgcaaaggctccttctttgagcaagacttggataccctgccgaactttacgtcggaagggtatggttcaattcgtcgtgtgtatgtttacggcgaagaagaccagatctttagccgcgattttcagttatggcaaattaataattataagcctgataaagtgtactgtgtaccgagtgctgaccacaagattatgatcagcaaggtcaacgagctggcccagattctccaagaagttgcaaactctgcgagtgatcttcttgcagtggct

SEQ ID NO: 1082 - protein, 263 aa, synthetic construct
  REGION 1..263: note = Round 4 (Selectivity)
MVSAHFILIHSICHGAWVWYKLIPLLQSAGHNVTAIDLWASGSNPRQLEQIGTWEQYSEPLFTLIESIPEGKKVILVGESGGGINIALAAEKYPEKVSALVFSNALMPDIDHSPAFVYKKYSEVFTDWKDSIFSNYTYGNDTVTAVELGDRTLAENIFSNSPIEDVELAKHRVRKGSFFEQDLDTLPNFTSEGYGSIRRVYVYGEEDQIFSRDFQLWQINNYKPDKVYCVPSADHKIMISKVNELAQILQEVANSASDLLAVA

SEQ ID NO: 1083 - DNA, 789 bp, synthetic construct
  misc_feature 1..789: note = Round 4 (Activity)
  source 1..789: mol_type = other DNA
atggttagtgcgcattttattctgatccacagtgtttgccatggcgcctggctgtggtataaactgatcccgttattacagtctgcaggtcataacgttacggcgattgatctttgggctagcgggatgaatcctcgccaactggaacagattggcacatgggagcagtactcagaaccattgttcaccctgatcgaatcgattccggaaggtaagaaagtcattctggtaggagaatcctttggcggcatcaatattgcactggccgcggagaaatatccggagaaagtgagcgccctcgtctttagcaacgcacttatgcccgatatcgatcacagtccagcgttcgtgtataagaaatatagcgaagttttcactgactggaaagattcgatcttcagcaattatacctacggtaacgacacggttaccgcggtggaattgggagatcgtactctggccgagaacatcttctccaattctccgattgaagatgtagaactggcgaaacatcgtgtccgcaaaggctccttttttgtgcaagacttggataccctgccgaactttacgtcggaagggtatggttcaattcgtcgtgtgtatgtttacggcgaagaagaccagatctttagccgcgattttcagttatggcaaattaataattataagcctgataaagtgtactgtgtaccgagtgctgaccacaagattatgatcagccgcgtcaacgagctggcccagattctccaagaagttgcaaactctgcgagtgatcttcttgcagtggct

SEQ ID NO: 1084 - protein, 263 aa, synthetic construct
  REGION 1..263: note = Round 4 (Activity)
MVSAHFILIHSVCHGAWLWYKLIPLLQSAGHNVTAIDLWASGMNPRQLEQIGTWEQYSEPLFTLIESIPEGKKVILVGESFGGINIALAAEKYPEKVSALVFSNALMPDIDHSPAFVYKKYSEVFTDWKDSIFSNYTYGNDTVTAVELGDRTLAENIFSNSPIEDVELAKHRVRKGSFFVQDLDTLPNFTSEGYGSIRRVYVYGEEDQIFSRDFQLWQINNYKPDKVYCVPSADHKIMISRVNELAQILQEVANSASDLLAVA

SEQ ID NO: 1085 - DNA, 789 bp, synthetic construct
  misc_feature 1..789: note = Round 4 (Selectivity)
  source 1..789: mol_type = other DNA
atggttagtgcgcattttattctgatccacagtgtttgccatggcgcctggctgtggtataaactgatcccgttattacagtctgcaggtcataacgttacggcgattgatctttgggctagcgggtcgaatcctcgccaactggaacagattggcacatgggagcagtactcagaaccattgttcaccctgatcgaatcgattccggaaggtaagaaagtcattctggtaggagaatccggtggcggcatcaatattgcactggccgcggagaaatatccggagaaagtgagcgccctcgtctttagcaacgcacttatgcccgatatcgatcacagtccagcgttcgtgtataagaaatatagcgaagttttcactgactggaaagattcgatcttcagcaattatacctacggtaacgacacggttaccgcggtggaattgggagatcgtactctggccgagaacatcttctccaattctccgattgaagatgtagaactggcgaaacatcgtgtccgcaaaggctccttttttgtgcaagacttggataccctgccgaactttacgtcggaagggtatggttcaattcgtcgtgtgtatgtttacggcgaagaagaccagatctttagccgcgattttcagttatggcaaattaataattataagcctgataaagtgtactgtgtaccgggggctgaccacaagattatgatcagccgcgtcaacgagctggcccagattctccaagaagttgcaaactctgcgagtgatcttcttgcagtggct

SEQ ID NO: 1086 - protein, 263 aa, synthetic construct
  REGION 1..263: note = Round 4 (Selectivity)
MVSAHFILIHSVCHGAWLWYKLIPLLQSAGHNVTAIDLWASGSNPRQLEQIGTWEQYSEPLFTLIESIPEGKKVILVGESGGGINIALAAEKYPEKVSALVFSNALMPDIDHSPAFVYKKYSEVFTDWKDSIFSNYTYGNDTVTAVELGDRTLAENIFSNSPIEDVELAKHRVRKGSFFVQDLDTLPNFTSEGYGSIRRVYVYGEEDQIFSRDFQLWQINNYKPDKVYCVPGADHKIMISRVNELAQILQEVANSASDLLAVA

SEQ ID NO: 1087 - DNA, 789 bp, synthetic construct
  misc_feature 1..789: note = Round 4 (Selectivity)
  source 1..789: mol_type = other DNA
atggttagtgcgcattttattctgatccacagtatttgccatggcgcctggctgtggtataaactgatcccgttattacagtctgcaggtcataacgttacggcgattgatctttgggctagcgggtcgaatcctcgccaactggaacagattggcacatgggagcagtactcagaaccattgttcacgctgatcgaatcgattccggaaggtaagaaagtcattctggtaggagaatccgggggcggcatcaatattgcactggccgcggagaaatatccggagaaagtgagcgccctcgtctttagcaacgcacttatgcccgatatcgatcacagtccagcgttcgtgtataagaaatatagcgaagttttcactgactggaaagattcgatcttcagcaattatacctacggtaacgacacggttaccgcggtggaattgggagatcgtactctggccgagaacatcttctccaattctccgattgaagatgtagaactggcgaaacatcgtgtccgcaaaggctccttttttctgcaagacttggataccctgccgaactttacgtcggaagggtatggttcaattcgtcgtgtgtatgtttacggcgaagaagaccagatctttagccgcgattttcagttatggcaaattaataattataagcctgataaagtgtactgtgtaccgggggctgaccacaagattatgatcagcaaagtcaacgagctggcccagattctccaagaagttgcaaactctgcgagtgatcttcttgcagtggct

SEQ ID NO: 1088 - protein, 263 aa, synthetic construct
  REGION 1..263: note = Round 4 (Selectivity)
MVSAHFILIHSICHGAWLWYKLIPLLQSAGHNVTAIDLWASGSNPRQLEQIGTWEQYSEPLFTLIESIPEGKKVILVGESGGGINIALAAEKYPEKVSALVFSNALMPDIDHSPAFVYKKYSEVFTDWKDSIFSNYTYGNDTVTAVELGDRTLAENIFSNSPIEDVELAKHRVRKGSFFLQDLDTLPNFTSEGYGSIRRVYVYGEEDQIFSRDFQLWQINNYKPDKVYCVPGADHKIMISKVNELAQILQEVANSASDLLAVA

SEQ ID NO: 1089 - DNA, 789 bp, synthetic construct
  misc_feature 1..789: note = Round 4 (Activity)
  source 1..789: mol_type = other DNA
atggttagtgcgcattttattctgatccacagtatttgccatggcgcctggctgtggtataaactgatcccgttattacagtctgcaggtcataacgttacggcgattgatctttgggctagcgggtcgaatcctcgccaactggaacagattggcacatgggagcagtactcagaaccattgttcacgctgatcgaatcgattccggaaggtaagaaagtcattctggtaggagaatcctttggcggcatcaatattgcactggccgcggagaaatatccggagaaagtgagcgccctcgtctttagcaacgcacttatgcccgatatcgatcacagtccagcgttcgtgtataagaaatatagcgaagttttcactgactggaaagattcgatcttcagcaattatacctacggtaacgacacggttaccgcgattgaattgggagatcgtactctggccgagaacatcttctccaattctccgattgaagatgtagaactggcgaaacatcgtgtccgcaaaggctccttttttgagcaagacttggataccctgccgaactttacgtcggaagggtatggttcaattcgtcgtgtgtatgtttacggcgaagaagaccagatctttagccgcgattttcagttatggcaaattaataattataagcctgataaagtgtactgtgtaccgagtgctgaccacaagattatgatcagccgcgtcaacgagctggcccagattctccaagaagttgcaaactctgcgagtgatcttcttgcagtggct

SEQ ID NO: 1090 - protein, 263 aa, synthetic construct
  REGION 1..263: note = Round 4 (Activity)
MVSAHFILIHSICHGAWLWYKLIPLLQSAGHNVTAIDLWASGSNPRQLEQIGTWEQYSEPLFTLIESIPEGKKVILVGESFGGINIALAAEKYPEKVSALVFSNALMPDIDHSPAFVYKKYSEVFTDWKDSIFSNYTYGNDTVTAIELGDRTLAENIFSNSPIEDVELAKHRVRKGSFFEQDLDTLPNFTSEGYGSIRRVYVYGEEDQIFSRDFQLWQINNYKPDKVYCVPSADHKIMISRVNELAQILQEVANSASDLLAVA

SEQ ID NO: 1091 - DNA, 789 bp, synthetic construct
  misc_feature 1..789: note = Round 4 (Selectivity)
  source 1..789: mol_type = other DNA
atggttagtgcgcattttattctgatccacagtatttgccatggcgcctggctgtggtataaactgatcccgttattacagtctgcaggtcataacgttacggcgattgatctttgggctagcgggagtaatcctcgccaactggaacagattggcacatgggagcagtactcagaaccattgttcaccctgatcgaatcgattccggaaggtaagaaagtcattctggtaggagaatccggtggcggcatcaatattgcactggccgcggagaaatatccggagaaagtgagcgccctcgtctttagtaacgcacttatgcccgatatcgatcacagtccagcgttcgtgtataagaaatatagcgaagttttcactgactggaaagattcgatcttcagcaattatacctacggtaacgacacggttaccgcggtggaattgggagatcgtactctggccgagaacatcttctccaattctccgattgaagatgtagaactggcgaaacatgtggtccgcaaaggctccttctttgagcaagacttggataccctgccgaactttacgtcggaagggtatggttcaattcgtcgtgtgtatgtttacggcgaagaagaccagatctttagccgcgattttcagttatggcaaattaataattataagcctgataaagtgtactgtgtaccgagtgctgaccacaagattatgatcagcaaggtcaacgagctggcccagattctccaagaagttgcaaactctgcgagtgatcttcttgcagtggct

SEQ ID NO: 1092 - protein, 263 aa, synthetic construct
  REGION 1..263: note = Round 4 (Selectivity)
MVSAHFILIHSICHGAWLWYKLIPLLQSAGHNVTAIDLWASGSNPRQLEQIGTWEQYSEPLFTLIESIPEGKKVILVGESGGGINIALAAEKYPEKVSALVFSNALMPDIDHSPAFVYKKYSEVFTDWKDSIFSNYTYGNDTVTAVELGDRTLAENIFSNSPIEDVELAKHVVRKGSFFEQDLDTLPNFTSEGYGSIRRVYVYGEEDQIFSRDFQLWQINNYKPDKVYCVPSADHKIMISKVNELAQILQEVANSASDLLAVA

SEQ ID NO: 1093 - DNA, 789 bp, synthetic construct
  misc_feature 1..789: note = Round 4 (Activity)
  source 1..789: mol_type = other DNA
atggttagtgcgcattttattctgatccacagtgtttgccatggcgcctggctgtggtataaactgatcccgttattacagtctgcaggtcataacgttacggcgattgatctttgggctagcgggcagaatcctcgccaactggaacagattggcacatgggagcagtactcagaaccattgttcccgctgatcgaatcgattccggaaggtaagaaagtcattctggtaggagaatccgggggcggcatcaatattgcactggccgcggagaaatatccggagaaagtgagcgccctcgtctttctgaacgcacttatgcccgatatcgatcacagtccagcgttcgtgtataagaaatatagcgaagttttcactgactggaaagattcgatcttcagcaattatacctacggtaacgacacggttaccgcgattgaattgggagatcgtactctggccgagaacatcttctccaattctccgattgaagatgtagaactggcgaaacatcgtgtccgcaaaggctccttctttgagcaagacttggataccctgccgaactttacgtcggaagggtatggttcaattcgtcgtgtgtatgtttacggcgaagaagaccagatctttagccgcgattttcagttatggcaaattaataattataagcctgataaagtgtactgtgtaccgagtgctgaccacaagattatgatcagccgcgtcaacgagctggcccagattctccaagaagttgcaaactctgcgagtgatcttcttgcagtggct

SEQ ID NO: 1094 - protein, 263 aa, synthetic construct
  REGION 1..263: note = Round 4 (Activity)
MVSAHFILIHSVCHGAWLWYKLIPLLQSAGHNVTAIDLWASGQNPRQLEQIGTWEQYSEPLFPLIESIPEGKKVILVGESGGGINIALAAEKYPEKVSALVFLNALMPDIDHSPAFVYKKYSEVFTDWKDSIFSNYTYGNDTVTAIELGDRTLAENIFSNSPIEDVELAKHRVRKGSFFEQDLDTLPNFTSEGYGSIRRVYVYGEEDQIFSRDFQLWQINNYKPDKVYCVPSADHKIMISRVNELAQILQEVANSASDLLAVA

SEQ ID NO: 1095 - DNA, 789 bp, synthetic construct
  misc_feature 1..789: note = Round 4 (Activity)
  source 1..789: mol_type = other DNA
atggttagtgcgcattttattctgatccacagtatttgccatggcgcctggctgtggtataaactgatcccgttattacagtctgcaggtcataacgttacggcgattgatctttgggctagcgggtcgaatcctcgccaactggaacagattggcacatgggagcagtactcagaaccattgttcaccctgatcgaatcgattccggaaggtaagaaagtcattctggtaggagaatcctttggcggcatcaatattgcactggccgcggagaaatatccggagaaagtgagcgccctcgtctttctgaacgcacttatgcccgatatcgatcacagtccagcgttcgtgtataagaaatatagcgaagttttcactgactggaaagattcgatcttcagcaattatacctacggtaacgacacggttaccgcgattgaattgggagatcgtactctggccgagaacatcttctccaattctccgattgaagatgtagaactggcgaaacatcgtgtccgcaaaggctccttttttgagcaagacttggataccctgccgaactttacgtcggaagggtatggttcaattcgtcgtgtgtatgtttacggcgaagaagaccagatctttagccgcgattttcagttatggcaaattaataattataagcctgataaagtgtactgtgtaccgagtgctgaccacaagattatgatcagcaaagtcaacgagctggcccagattctccaagaagttgcaaactctgcgagtgatcttcttgcagtggct

SEQ ID NO: 1096 - protein, 263 aa, synthetic construct
  REGION 1..263: note = Round 4 (Activity)
MVSAHFILIHSICHGAWLWYKLIPLLQSAGHNVTAIDLWASGSNPRQLEQIGTWEQYSEPLFTLIESIPEGKKVILVGESFGGINIALAAEKYPEKVSALVFLNALMPDIDHSPAFVYKKYSEVFTDWKDSIFSNYTYGNDTVTAIELGDRTLAENIFSNSPIEDVELAKHRVRKGSFFEQDLDTLPNFTSEGYGSIRRVYVYGEEDQIFSRDFQLWQINNYKPDKVYCVPSADHKIMISKVNELAQILQEVANSASDLLAVA

SEQ ID NO: 1097 - DNA, 789 bp, synthetic construct
  misc_feature 1..789: note = Round 4 (Activity)
  source 1..789: mol_type = other DNA
atggttagtgcgcattttattctgatccacagtatttgccatggcgcctggctgtggtataaactgatcccgttattacagtctgcaggtcataacgttacggcgattgatctttgggctagcgggagtaatcctcgccaactggaacagattggcacatgggagcagtactcagaaccattgttcaccctgatcgaatcgattccggaaggtaagaaagtcattctggtaggagaatccggtggcggcatcaatattgcactggccgcggagaaatatccggagaaagtgagcgccctcgtctttagtaacgcacttatgcccgatatcgatcacagtccagcgttcgtgtataagaaatatagcgaagttttcactgactggaaagattcgatcttcagcaattatacctacggtaacgacacggttaccgcggtggaattgggagatcgtactctggccgagaacatcttctccaattctccgattgaagatgtagaactggcgaaacatcgtgtccgcaaaggctccttttttgagcaagacttggataccctgccgaactttacgtcggaagggtatggttcaattcgtcgtgtgtatgtttacggcgaagaagaccagatctttagccgcgattttcagttatggcaaattaataattataagcctgataaagtgtactgtgtaccgggggctgaccacaagattatgatcagccgcgtcaacgagctggcccagattctccaagaagttgcaaactctgcgagtgatcttcttgcagtggct

SEQ ID NO: 1098 - protein, 263 aa, synthetic construct
  REGION 1..263: note = Round 4 (Activity)
MVSAHFILIHSICHGAWLWYKLIPLLQSAGHNVTAIDLWASGSNPRQLEQIGTWEQYSEPLFTLIESIPEGKKVILVGESGGGINIALAAEKYPEKVSALVFSNALMPDIDHSPAFVYKKYSEVFTDWKDSIFSNYTYGNDTVTAVELGDRTLAENIFSNSPIEDVELAKHRVRKGSFFEQDLDTLPNFTSEGYGSIRRVYVYGEEDQIFSRDFQLWQINNYKPDKVYCVPGADHKIMISRVNELAQILQEVANSASDLLAVA

SEQ ID NO: 1099 - DNA, 789 bp, synthetic construct
  misc_feature 1..789: note = Round 4 (Activity)
  source 1..789: mol_type = other DNA
atggttagtgcgcattttattctgatccacagtatttgccatggcgcctggctgtggtataaactgatcccgttattacagtctgcaggtcataacgttacggcgattgatctttgggctagcgggtcgaatcctcgccaactggaacagattggcacatgggagcagtactcagaaccattgttcaccctgatcgaatcgattccggaaggtaagaaagtcattctggtaggagaatcctttggcggcatcaatattgcactggccgcggagaaatatccggagaaagtgagcgccctcgtctttagcaacgcacttatgcccgatatcgatcacagtccagcgttcgtgtataagaaatatagcgaagttttcactgactggaaagattcgatcttcagcaattatacctacggtaacgacacggttaccgcgattgaattgggagatcgtactctggccgagaacatcttctccaattctccgattgaagatgtagaactggcgaaacatcgtgtccgcaaaggctccttttttctgcaagacttggataccctgccgaactttacgtcggaagggtatggttcaattcgtcgtgtgtatgtttacggcgaagaagaccagatctttagccgcgattttcagttatggcaaattaataattataagcctgataaagtgtactgtgtaccgagtgctgaccacaagattatgatcagccgcgtcaacgagctggcccagattctccaagaagttgcaaactctgcgagtgatcttcttgcagtggct

SEQ ID NO: 1100 - protein, 263 aa, synthetic construct
  REGION 1..263: note = Round 4 (Activity)
MVSAHFILIHSICHGAWLWYKLIPLLQSAGHNVTAIDLWASGSNPRQLEQIGTWEQYSEPLFTLIESIPEGKKVILVGESFGGINIALAAEKYPEKVSALVFSNALMPDIDHSPAFVYKKYSEVFTDWKDSIFSNYTYGNDTVTAIELGDRTLAENIFSNSPIEDVELAKHRVRKGSFFLQDLDTLPNFTSEGYGSIRRVYVYGEEDQIFSRDFQLWQINNYKPDKVYCVPSADHKIMISRVNELAQILQEVANSASDLLAVA

SEQ ID NO: 1101 - DNA, 789 bp, synthetic construct
  misc_feature 1..789: note = Round 4 (Activity)
  source 1..789: mol_type = other DNA
atggttagtgcgcattttattctgatccacagtgtttgccatggcgcctggctgtggtataaactgatcccgttattacagtctgcaggtcataacgttacggcgattgatctttgggctagcgggcagaatcctcgccaactggaacagattggcacatgggagcagtactcagaaccattgttcaccctgatcgaatcgattccggaaggtaagaaagtcattctggtaggagaatccgggggcggcatcaatattgcactggccgcggagaaatatccggagaaagtgagcgccctcgtctttgtgaacgcacttatgcccgatatcgatcacagtccagcgttcgtgtataagaaatatagcgaagttttcactgactggaaagattcgatcttcagcaattatacctacggtaacgacacggttaccgcggtggaattgggagatcgtactctggccgagaacatcttctccaattctccgattgaagatgtagaactggcgaaacatcgtgtccgcaaaggctccttttttgagcaagacttggataccctgccgaactttacgtcggaagggtatggttcaattcgtcgtgtgtatgtttacggcgaagaagaccagatctttagccgcgattttcagttatggcaaattaataattataagcctgataaagtgtactgtgtaccgagtgctgaccacaagattatgatcagcaaagtcaacgagctggcccagattctccaagaagttgcaaactctgcgagtgatcttcttgcagtggct

SEQ ID NO: 1102 - protein, 263 aa, synthetic construct
  REGION 1..263: note = Round 4 (Activity)
MVSAHFILIHSVCHGAWLWYKLIPLLQSAGHNVTAIDLWASGQNPRQLEQIGTWEQYSEPLFTLIESIPEGKKVILVGESGGGINIALAAEKYPEKVSALVFVNALMPDIDHSPAFVYKKYSEVFTDWKDSIFSNYTYGNDTVTAVELGDRTLAENIFSNSPIEDVELAKHRVRKGSFFEQDLDTLPNFTSEGYGSIRRVYVYGEEDQIFSRDFQLWQINNYKPDKVYCVPSADHKIMISKVNELAQILQEVANSASDLLAVA

SEQ ID NO: 1103 - DNA, 789 bp, synthetic construct
  misc_feature 1..789: note = Round 4 (Activity)
  source 1..789: mol_type = other DNA
atggttagtgcgcattttattctgatccacagtatttgccatggcgcctggctgtggtataaactgatcccgttattacagtctgcaggtcataacgttacggcgattgatctttgggctagcgggagtaatcctcgccaactggaacagattggcacatgggagcagtactcagaaccattgttcaccctgatcgaatcgattccggaaggtaagaaagtcattctggtaggagaatccggtggcggcatcaatattgcactggccgcggagaaatatccggagaaagtgagcgccctcgtctttagtaacgcacttatgcccgatatcgatcacagtccagcgttcgtgtataagaaatatagcgaagttttcactgactggaaagattcgatcttcagcaattatacctacggtaacgacacggttaccgcggtggaattgggacatcgtactctggccgagaacatcttctccaattctccgattgaagatgtagaactggcgaaacatcgtgtccgcaaaggctccttctttgagcaagacttggataccctgccgaactttacgtcggaagggtatggttcaattcgtcgtgtgtatgtttacggcgaagaagaccagatctttagccgcgattttcagttatggcaaattaataattataagcctgataaagtgtactgtgtaccgagtgctgaccacaagattatgatcagcaaggtcaacgagctggcccagattctccaagaagttgcaaactctgcgagtgatcttcttgcagtggct

SEQ ID NO: 1104 - protein, 263 aa, synthetic construct
  REGION 1..263: note = Round 4 (Activity)
MVSAHFILIHSICHGAWLWYKLIPLLQSAGHNVTAIDLWASGSNPRQLEQIGTWEQYSEPLFTLIESIPEGKKVILVGESGGGINIALAAEKYPEKVSALVFSNALMPDIDHSPAFVYKKYSEVFTDWKDSIFSNYTYGNDTVTAVELGHRTLAENIFSNSPIEDVELAKHRVRKGSFFEQDLDTLPNFTSEGYGSIRRVYVYGEEDQIFSRDFQLWQINNYKPDKVYCVPSADHKIMISKVNELAQILQEVANSASDLLAVA

SEQ ID NO: 1105 - DNA, 789 bp, synthetic construct
  misc_feature 1..789: note = Round 4 (Activity)
  source 1..789: mol_type = other DNA
atggttagtgcgcattttattctgatccacagtatttgccatggcgcctggctgtggtataaactgatcccgttattacagtctgcaggtcataacgttacggcgattgatctttgggctagcgggatgaatcctcgccaactggaacagattggcacatgggagcagtactcagaaccattgttcaccctgatcgaatcgattccggaaggtaagaaagtcattctggtaggagaatccgggggcggcatcaatattgcactggccgcggagaaatatccggagaaagtgagcgccctcgtctttctgaacgcacttatgcccgatatcgatcacagtccagcgttcgtgtataagaaatatagcgaagttttcactgactggaaagattcgatcttcagcaattatacctacggtaacgacacggttaccgcggtggaattgggagatcgtactctggccgagaacatcttctccaattctccgattgaagatgtagaactggcgaaacatcgtgtccgcaaaggctccttctttgagcaagacttggataccctgccgaactttacgtcggaagggtatggttcaattcgtcgtgtgtatgtttacggcgaagaagaccagatctttagccgcgattttcagttatggcaaattaataattataagcctgataaagtgtactgtgtaccgagtgctgaccacaagattatgatcagccgcgtcaacgagctggcccagattctccaagaagttgcaaactctgcgagtgatcttcttgcagtggct

SEQ ID NO: 1106 - protein, 263 aa, synthetic construct
  REGION 1..263: note = Round 4 (Activity)
MVSAHFILIHSICHGAWLWYKLIPLLQSAGHNVTAIDLWASGMNPRQLEQIGTWEQYSEPLFTLIESIPEGKKVILVGESGGGINIALAAEKYPEKVSALVFLNALMPDIDHSPAFVYKKYSEVFTDWKDSIFSNYTYGNDTVTAVELGDRTLAENIFSNSPIEDVELAKHRVRKGSFFEQDLDTLPNFTSEGYGSIRRVYVYGEEDQIFSRDFQLWQINNYKPDKVYCVPSADHKIMISRVNELAQILQEVANSASDLLAVA

SEQ ID NO: 1107 - DNA, 789 bp, synthetic construct
  misc_feature 1..789: note = Round 4 (Activity)
  source 1..789: mol_type = other DNA
atggttagtgcgcattttattctgatccacagtgtttgccatggcgcctggctgtggtataaactgatcccgttattacagtctgcaggtcataacgttacggcgattgatctttgggctagcgggatgaatcctcgccaactggaacagattggcacatgggagcagtactcagaaccattgttcaccctgatcgaatcgattccggaaggtaagaaagtcattctggtaggagaatccggtggcggcatcaatattgcactggccgcggagaaatatccggagaaagtgagcgccctcgtctttctgaacgcacttatgcccgatatcgatcacagtccagcgttcgtgtataagaaatatagcgaagttttcactgactggaaagattcgatcttcagcaattatacctacggtaacgacacggttaccgcggtggaattgggagatcgtactctggccgagaacatcttctccaattctccgattgaagatgtagaactggcgaaacatcgtgtccgcaaaggctccttttttgagcaagacttggataccctgccgaactttacgtcggaagggtatggttcaattcgtcgtgtgtatgtttacggcgaagaagaccagatctttagccgcgattttcagttatggcaaattaataattataagcctgataaagtgtactgtgtaccgagtgctgaccacaagattatgatcagccgcgtcaacgagctggcccagattctccaagaagttgcaaactctgcgagtgatcttcttgcagtggct

SEQ ID NO: 1108 - protein, 263 aa, synthetic construct
  REGION 1..263: note = Round 4 (Activity)
MVSAHFILIHSVCHGAWLWYKLIPLLQSAGHNVTAIDLWASGMNPRQLEQIGTWEQYSEPLFTLIESIPEGKKVILVGESGGGINIALAAEKYPEKVSALVFLNALMPDIDHSPAFVYKKYSEVFTDWKDSIFSNYTYGNDTVTAVELGDRTLAENIFSNSPIEDVELAKHRVRKGSFFEQDLDTLPNFTSEGYGSIRRVYVYGEEDQIFSRDFQLWQINNYKPDKVYCVPSADHKIMISRVNELAQILQEVANSASDLLAVA

SEQ ID NO: 1109 - DNA, 789 bp, synthetic construct
  misc_feature 1..789: note = Round 4 (Activity)
  source 1..789: mol_type = other DNA
atggttagtgcgcattttattctgatccacagtgtttgccatggcgcctggctgtggtataaactgatcccgttattacagtctgcaggtcataacgttacggcgattgatctttgggctagcgggtcgaatcctcgccaactggaacagattggcacatgggagcagtactcagaaccattgttcccgctgatcgaatcgattccggaaggtaagaaagtcattctggtaggagaatcctttggcggcatcaatattgcactggccgcggagaaatatccggagaaagtgagcgccctcgtctttctgaacgcacttatgcccgatatcgatcacagtccagcgttcgtgtataagaaatatagcgaagttttcactgactggaaagattcgatcttcagcaattatacctacggtaacgacacggttaccgcggtggaattgggagatcgtactctggccgagaacatcttctccaattctccgattgaagatgtagaactggcgaaacatcgtgtccgcaaaggctccttttttgagcaagacttggataccctgccgaactttacgtcggaagggtatggttcaattcgtcgtgtgtatgtttacggcgaagaagaccagatctttagccgcgattttcagttatggcaaattaataattataagcctgataaagtgtactgtgtaccgagtgctgaccacaagattatgatcagccgcgtcaacgagctggcccagattctccaagaagttgcaaactctgcgagtgatcttcttgcagtggct

SEQ ID NO: 1110 - protein, 263 aa, synthetic construct
  REGION 1..263: note = Round 4 (Activity)
MVSAHFILIHSVCHGAWLWYKLIPLLQSAGHNVTAIDLWASGSNPRQLEQIGTWEQYSEPLFPLIESIPEGKKVILVGESFGGINIALAAEKYPEKVSALVFLNALMPDIDHSPAFVYKKYSEVFTDWKDSIFSNYTYGNDTVTAVELGDRTLAENIFSNSPIEDVELAKHRVRKGSFFEQDLDTLPNFTSEGYGSIRRVYVYGEEDQIFSRDFQLWQINNYKPDKVYCVPSADHKIMISRVNELAQILQEVANSASDLLAVA

SEQ ID NO: 1111 - DNA, 789 bp, synthetic construct
  misc_feature 1..789: note = Round 4 (Activity)
  source 1..789: mol_type = other DNA
atggttagtgcgcattttattctgatccacagtgtttgccatggcgcctggctgtggtataaactgatcccgttattacagtctgcaggtcataacgttacggcgattgatctttgggctagcgggatgaatcctcgccaactggaacagattggcacatgggagcagtactcagaaccattgttcaccctgatcgaatcgattccggaaggtaagaaagtcattctggtaggagaatccggtggcggcatcaatattgcactggccgcggagaaatatccggagaaagtgagcgccctcgtctttagcaacgcacttatgcccgatatcgatcacagtccagcgttcgtgtataagaaatatagcgaagttttcactgactggaaagattcgatcttcagcaattatacctacggtaacgacacggttaccgcggtggaattgggagatcgtactctggccgagaacatcttctccaattctccgattgaagatgtagaactggcgaaacatcgtgtccgcaaaggctccttttttgtgcaagacttggataccctgccgaactttacgtcggaagggtatggttcaattcgtcgtgtgtatgtttacggcgaagaagaccagatctttagccgcgattttcagttatggcaaattaataattataagcctgataaagtgtactgtgtaccgagtgctgaccacaagattatgatcagccgcgtcaacgagctggcccagattctccaagaagttgcaaactctgcgagtgatcttcttgcagtggct

SEQ ID NO: 1112 - protein, 263 aa, synthetic construct
  REGION 1..263: note = Round 4 (Activity)
MVSAHFILIHSVCHGAWLWYKLIPLLQSAGHNVTAIDLWASGMNPRQLEQIGTWEQYSEPLFTLIESIPEGKKVILVGESGGGINIALAAEKYPEKVSALVFSNALMPDIDHSPAFVYKKYSEVFTDWKDSIFSNYTYGNDTVTAVELGDRTLAENIFSNSPIEDVELAKHRVRKGSFFVQDLDTLPNFTSEGYGSIRRVYVYGEEDQIFSRDFQLWQINNYKPDKVYCVPSADHKIMISRVNELAQILQEVANSASDLLAVA

SEQ ID NO: 1113 - DNA, 789 bp, synthetic construct
  misc_feature 1..789: note = Round 4 (Activity)
  source 1..789: mol_type = other DNA
atggttagtgcgcattttattctgatccacagtatttgccatggcgcctggctgtggtataaactgatcccgttattacagtctgcaggtcataacgttacggcgattgatctttgggctagcgggagtaatcctcgccaactggaacagattggcacatgggagcagtactcagaaccattgttcaccctgatcgaatcgattccggaaggtaagaaagtcattctggtaggagaatcccagggcggcatcaatattgcactggccgcggagaaatatccggagaaagtgagcgccctcgtctttagtaacgcacttatgcccgatatcgatcacagtccagcgttcgtgtataagaaatatagcgaagttttcactgactggaaagattcgatcttcagcaattatacctacggtaacgacacggttaccgcggtggaattgggagatcgtactctggccgagaacatcttctccaattctccgattgaagatgtagaactggcgaaacatcgtgtccgcaaaggctccttctttgagcaagacttggataccctgccgaactttacgtcggaagggtatggttcaattcgtcgtgtgtatgtttacggcgaagaagaccagatctttagccgcgattttcagttatggcaaattaataattataagcctgataaagtgtactgtgtaccgagtgctgaccacaagattatgatcagcaaggtcaacgagctggcccagattctccaagaagttgcaaactctgcgagtgatcttcttgcagtggct

SEQ ID NO: 1114 - protein, 263 aa, synthetic construct
  REGION 1..263: note = Round 4 (Activity)
MVSAHFILIHSICHGAWLWYKLIPLLQSAGHNVTAIDLWASGSNPRQLEQIGTWEQYSEPLFTLIESIPEGKKVILVGESQGGINIALAAEKYPEKVSALVFSNALMPDIDHSPAFVYKKYSEVFTDWKDSIFSNYTYGNDTVTAVELGDRTLAENIFSNSPIEDVELAKHRVRKGSFFEQDLDTLPNFTSEGYGSIRRVYVYGEEDQIFSRDFQLWQINNYKPDKVYCVPSADHKIMISKVNELAQILQEVANSASDLLAVA

SEQ ID NO: 1115 - DNA, 789 bp, synthetic construct
  misc_feature 1..789: note = Round 4 (Activity)
  source 1..789: mol_type = other DNA
atggttagtgcgcattttattctgatccacagtatttgccatggcgcctggctgtggtataaactgatcccgttattacagtctgcaggtcataacgttacggcgattgatctttgggctagcgggagtaatcctcgccaactggaacagattggcacatgggagcagtactcagaaccattgttcaccctgatcgaatcgattccggaaggtaagaaagtcattctggtaggagaatccggtggcggctacaatattgcactggccgcggagaaatatccggagaaagtgagcgccctcgtctttagtaacgcacttatgcccgatatcgatcacagtccagcgttcgtgtataagaaatatagcgaagttttcactgactggaaagattcgatcttcagcaattatacctacggtaacgacacggttaccgcggtggaattgggagatcgtactctggccgagaacatcttctccaattctccgattgaagatgtagaactggcgaaacatcgtgtccgcaaaggctccttctttgagcaagacttggataccctgccgaactttacgtcggaagggtatggttcaattcgtcgtgtgtatgtttacggcgaagaagaccagatctttagccgcgattttcagttatggcaaattaataattataagcctgataaagtgtactgtgtaccgagtgctgaccacaagattatgatcagcaaggtcaacgagctggcccagattctccaagaagttgcaaactctgcgagtgatcttcttgcagtggct

SEQ ID NO: 1116 - protein, 263 aa, synthetic construct
  REGION 1..263: note = Round 4 (Activity)
MVSAHFILIHSICHGAWLWYKLIPLLQSAGHNVTAIDLWASGSNPRQLEQIGTWEQYSEPLFTLIESIPEGKKVILVGESGGGYNIALAAEKYPEKVSALVFSNALMPDIDHSPAFVYKKYSEVFTDWKDSIFSNYTYGNDTVTAVELGDRTLAENIFSNSPIEDVELAKHRVRKGSFFEQDLDTLPNFTSEGYGSIRRVYVYGEEDQIFSRDFQLWQINNYKPDKVYCVPSADHKIMISKVNELAQILQEVANSASDLLAVA

SEQ ID NO: 1117 - DNA, 789 bp, synthetic construct
  misc_feature 1..789: note = Round 4 (Activity)
  source 1..789: mol_type = other DNA
atggttagtgcgcattttattctgatccacagtatttgccatggcgcctggctgtggtataaactgatcccgttattacagtctgcaggtcataacgttacggcgattgatctttgggctagcgggagtaatcctcgccaactggaacagattggcacatgggagcagtactcagaaccattgttcaccctgatcgaatcgattccggaaggtaagaaagtcattctggtagcggaatccggtggcggcatcaatattgcactggccgcggagaaatatccggagaaagtgagcgccctcgtctttagtaacgcacttatgcccgatatcgatcacagtccagcgttcgtgtataagaaatatagcgaagttttcactgactggaaagattcgatcttcagcaattatacctacggtaacgacacggttaccgcggtggaattgggagatcgtactctggccgagaacatcttctccaattctccgattgaagatgtagaactggcgaaacatcgtgtccgcaaaggctccttctttgagcaagacttggataccctgccgaactttacgtcggaagggtatggttcaattcgtcgtgtgtatgtttacggcgaagaagaccagatctttagccgcgattttcagttatggcaaattaataattataagcctgataaagtgtactgtgtaccgagtgctgaccacaagattatgatcagcaaggtcaacgagctggcccagattctccaagaagttgcaaactctgcgagtgatcttcttgcagtggct

SEQ ID NO: 1118 - protein, 263 aa, synthetic construct
  REGION 1..263: note = Round 4 (Activity)
MVSAHFILIHSICHGAWLWYKLIPLLQSAGHNVTAIDLWASGSNPRQLEQIGTWEQYSEPLFTLIESIPEGKKVILVAESGGGINIALAAEKYPEKVSALVFSNALMPDIDHSPAFVYKKYSEVFTDWKDSIFSNYTYGNDTVTAVELGDRTLAENIFSNSPIEDVELAKHRVRKGSFFEQDLDTLPNFTSEGYGSIRRVYVYGEEDQIFSRDFQLWQINNYKPDKVYCVPSADHKIMISKVNELAQILQEVANSASDLLAVA

SEQ ID NO: 1119 - DNA, 789 bp, synthetic construct
  misc_feature 1..789: note = Round 5 (Selectivity)
  source 1..789: mol_type = other DNA
atggttagtgcgcattttattctgatccacagtgtttgccatggcgcctggctgtggtataaactgatcccgttattacagtctgcaggtcataacgttacggcgattgatctttgggctagcgggagtaatcctcgccaactggaacagattggcacatgggagcagtactcagaaccattgttcaccctgatcgaatcgattccggaaggtaagaaagtcattctggtaggagaatccggtggcggcatcaatattgcactggccgcggagaaatatccggagaaagtgagcgccctcgtctttgtgaacgcacttatgcccgatatcgatcacagtccagcgttcgtgtataagaaatatagcgaagttttcactgactggaaagattcgatcttcagcaattatacctacggtaacgacacggttaccgcggtggaattgggagatcgtactctggccgagaacatcttctccaattctccgattgaagatgtagaactggcgaaacatcgtgtccgcaaaggctccttttttctgcaagacttggataccctgccgaactttacgtcggaagggtatggttcaattcgtcgtgtgtatgtttacggcgaagaagaccagatctttagccgcgattttcagttatggcaaattaataattataagcctgataaagtgtactgtgtaccgagtgctgaccacaagattatgatcagccgcgtcaacgagctggcccagattctccaagaagttgcaaactctgcgagtgatcttcttgcagtggct

SEQ ID NO: 1120 - protein, 263 aa, synthetic construct
  REGION 1..263: note = Round 5 (Selectivity)
MVSAHFILIHSVCHGAWLWYKLIPLLQSAGHNVTAIDLWASGSNPRQLEQIGTWEQYSEPLFTLIESIPEGKKVILVGESGGGINIALAAEKYPEKVSALVFVNALMPDIDHSPAFVYKKYSEVFTDWKDSIFSNYTYGNDTVTAVELGDRTLAENIFSNSPIEDVELAKHRVRKGSFFLQDLDTLPNFTSEGYGSIRRVYVYGEEDQIFSRDFQLWQINNYKPDKVYCVPSADHKIMISRVNELAQILQEVANSASDLLAVA

SEQ ID NO: 1121 - DNA, 789 bp, synthetic construct
  misc_feature 1..789: note = Round 4 (Selectivity)
  source 1..789: mol_type = other DNA
atggttagtgcgcattttattctgatccacagtatttgccatggcgcctggctgtggtataaactgatcccgttattacagtctgcaggtcataacgttacggcgattgatctttgggctagcgggagtaatcctcgccaactggaacagattggcacatgggagcagtactcagaaccattgttcaccctgatcgaatcgattccggaaggtaagaaagtcattctggtaggagaatccggtggcggcatcaatattgcactggccgcggagaaatatccggagaaagtgagcgccctcgtctttagtaacgcacttatgcccgatatcgatcacagtccagcgttcgtgtataagaaatatagcgaagttttcactgactggaaagattcgatcttcagcaattatacctacggtaacgacacggttaccgcggtggaattgggagatcgtactctggccgagaacatcttctccaattctccgattgaagatgtagaactggcgaaacatcgtgtccgcaaaggctccttctttgagcaagacttggataccctgccgaactttacgtcggaagggtatggttcaattcgtcgtgtgtatgtttacggcgaagaagactttatctttagccgcgattttcagttatggcaaattaataattataagcctgataaagtgtactgtgtaccgagtgctgaccacaagattatgatcagcaaggtcaacgagctggcccagattctccaagaagttgcaaactctgcgagtgatcttcttgcagtggct

SEQ ID NO: 1122 - protein, 263 aa, synthetic construct
  REGION 1..263: note = Round 4 (Selectivity)
MVSAHFILIHSICHGAWLWYKLIPLLQSAGHNVTAIDLWASGSNPRQLEQIGTWEQYSEPLFTLIESIPEGKKVILVGESGGGINIALAAEKYPEKVSALVFSNALMPDIDHSPAFVYKKYSEVFTDWKDSIFSNYTYGNDTVTAVELGDRTLAENIFSNSPIEDVELAKHRVRKGSFFEQDLDTLPNFTSEGYGSIRRVYVYGEEDFIFSRDFQLWQINNYKPDKVYCVPSADHKIMISKVNELAQILQEVANSASDLLAVA

SEQ ID NO: 1123 - DNA, 789 bp, synthetic construct; identical to SEQ ID NO: 1055
  misc_feature 1..789: note = Round 4 (Selectivity)
  source 1..789: mol_type = other DNA

SEQ ID NO: 1124 - protein, 263 aa, synthetic construct; identical to SEQ ID NO: 1056
  REGION 1..263: note = Round 4 (Selectivity)

SEQ ID NO: 1125 - DNA, 789 bp, synthetic construct; identical to SEQ ID NO: 1019
  misc_feature 1..789: note = Round 4 (Selectivity)
  source 1..789: mol_type = other DNA

SEQ ID NO: 1126 - protein, 263 aa, synthetic construct; identical to SEQ ID NO: 1020
  REGION 1..263: note = Round 4 (Selectivity)

SEQ ID NO: 1127 - DNA, 789 bp, synthetic construct; identical to SEQ ID NO: 981
  misc_feature 1..789: note = Round 4 (Selectivity)
  source 1..789: mol_type = other DNA

SEQ ID NO: 1128 - protein, 263 aa, synthetic construct; identical to SEQ ID NO: 982
  REGION 1..263: note = Round 4 (Selectivity)

SEQ ID NO: 1129 - DNA, 789 bp, synthetic construct
  misc_feature 1..789: note = Round 4 (Selectivity)
  source 1..789: mol_type = other DNA
atggttagtgcgcattttattctgatccacagtgtttgccatggcgcctggctgtggtataaactgatcccgttattacagtctgcaggtcataacgttacggcgattgatctttgggctagcgggcagaatcctcgccaactggaacagattggcacatgggagcagtactcagaaccattgttcccgctgatcgaatcgattccggaaggtaagaaagtcattctggtaggagaatccggtggcggcatcaatattgcactggccgcggagaaatatccggagaaagtgagcgccctcgtctttgtgaacgcacttatgcccgatatcgatcacagtccagcgttcgtgtataagaaatatagcgaagttttcactgactggaaagattcgatcttcagcaattatacctacggtaacgacacggttaccgcgattgaattgggagatcgtactctggccgagaacatcttctccaattctccgattgaagatgtagaactggcgaaacatcgtgtccgcaaaggctccttttttgagcaagacttggataccctgccgaactttacgtcggaagggtatggttcaattcgtcgtgtgtatgtttacggcgaagaagaccagatctttagccgcgattttcagttatggcaaattaataattataagcctgataaagtgtactgtgtaccgagtgctgaccacaagattatgatcagccgcgtcaacgagctggcccagattctccaagaagttgcaaactctgcgagtgatcttcttgcagtggct

SEQ ID NO: 1130 - protein, 263 aa, synthetic construct
  REGION 1..263: note = Round 4 (Selectivity)
MVSAHFILIHSVCHGAWLWYKLIPLLQSAGHNVTAIDLWASGQNPRQLEQIGTWEQYSEPLFPLIESIPEGKKVILVGESGGGINIALAAEKYPEKVSALVFVNALMPDIDHSPAFVYKKYSEVFTDWKDSIFSNYTYGNDTVTAIELGDRTLAENIFSNSPIEDVELAKHRVRKGSFFEQDLDTLPNFTSEGYGSIRRVYVYGEEDQIFSRDFQLWQINNYKPDKVYCVPSADHKIMISRVNELAQILQEVANSASDLLAVA

SEQ ID NO: 1131 - DNA, 789 bp, synthetic construct
  misc_feature 1..789: note = Round 4 (Selectivity)
  source 1..789: mol_type = other DNA
atggttagtgcgcattttattctgatccacagtatttgccatggcgcctggctgtggtataaactgatcccgttattacagtctgcaggtcataacgttacggcgattgatctttgggctagcgggcagaatcctcgccaactggaacagattggcacatgggagcagtactcagaaccattgttcacgctgatcgaatcgattccggaaggtaagaaagtcattctggtaggagaatccggtggcggcatcaatattgcactggccgcggagaaatatccggagaaagtgagcgccctcgtctttgtgaacgcacttatgcccgatatcgatcacagtccagcgttcgtgtataagaaatatagcgaagttttcactgactggaaagattcgatcttcagcaattatacctacggtaacgacacggttaccgcggtggaattgggagatcgtactctggccgagaacatcttctccaattctccgattgaagatgtagaactggcgaaacatcgtgtccgcaaaggctccttttttctgcaagacttggataccctgccgaactttacgtcggaagggtatggttcaattcgtcgtgtgtatgtttacggcgaagaagaccagatctttagccgcgattttcagttatggcaaattaataattataagcctgataaagtgtactgtgtaccgagtgctgaccacaagattatgatcagccgcgtcaacgagctggcccagattctccaagaagttgcaaactctgcgagtgatcttcttgcagtggct

SEQ ID NO: 1132 - protein, 263 aa, synthetic construct
  REGION 1..263: note = Round 4 (Selectivity)
MVSAHFILIHSICHGAWLWYKLIPLLQSAGHNVTAIDLWASGQNPRQLEQIGTWEQYSEPLFTLIESIPEGKKVILVGESGGGINIALAAEKYPEKVSALVFVNALMPDIDHSPAFVYKKYSEVFTDWKDSIFSNYTYGNDTVTAVELGDRTLAENIFSNSPIEDVELAKHRVRKGSFFLQDLDTLPNFTSEGYGSIRRVYVYGEEDQIFSRDFQLWQINNYKPDKVYCVPSADHKIMISRVNELAQILQEVANSASDLLAVA

SEQ ID NO: 1133 - DNA, 789 bp, synthetic construct
  misc_feature 1..789: note = Round 4 (Selectivity)
  source 1..789: mol_type = other DNA
atggttagtgcgcattttattctgatccacagtgtttgccatggcgcctggctgtggtataaactgatcccgttattacagtctgcaggtcataacgttacggcgattgatctttgggctagcgggatgaatcctcgccaactggaacagattggcacatgggagcagtactcagaaccattgttcaccctgatcgaatcgattccggaaggtaagaaagtcattctggtaggagaatccgggggcggcatcaatattgcactggccgcggagaaatatccggagaaagtgagcgccctcgtctttctgaacgcacttatgcccgatatcgatcacagtccagcgttcgtgtataagaaatatagcgaagttttcactgactggaaagattcgatcttcagcaattatacctacggtaacgacacggttaccgcgattgaattgggagatcgtactctggccgagaacatcttctccaattctccgattgaagatgtagaactggcgaaacatcgtgtccgcaaaggctccttttttgagcaagacttggataccctgccgaactttacgtcggaagggtatggttcaattcgtcgtgtgtatgtttacggcgaagaagaccagatctttagccgcgattttcagttatggcaaattaataattataagcctgataaagtgtactgtgtaccgagtgctgaccacaagattatgatcagccgcgtcaacgagctggcccagattctccaagaagttgcaaactctgcgagtgatcttcttgcagtggct

SEQ ID NO: 1134 - protein, 263 aa, synthetic construct
  REGION 1..263: note = Round 4 (Selectivity)
MVSAHFILIHSVCHGAWLWYKLIPLLQSAGHNVTAIDLWASGMNPRQLEQIGTWEQYSEPLFTLIESIPEGKKVILVGESGGGINIALAAEKYPEKVSALVFLNALMPDIDHSPAFVYKKYSEVFTDWKDSIFSNYTYGNDTVTAIELGDRTLAENIFSNSPIEDVELAKHRVRKGSFFEQDLDTLPNFTSEGYGSIRRVYVYGEEDQIFSRDFQLWQINNYKPDKVYCVPSADHKIMISRVNELAQILQEVANSASDLLAVA

SEQ ID NO: 1135 - DNA, 789 bp, synthetic construct
  misc_feature 1..789: note = Round 4 (Selectivity)
  source 1..789: mol_type = other DNA
atggttagtgcgcattttattctgatccacagtgtttgccatggcgcctggctgtggtataaactgatcccgttattacagtctgcaggtcataacgttacggcgattgatctttgggctagcgggatgaatcctcgccaactggaacagattggcacatgggagcagtactcagaaccattgttcaccctgatcgaatcgattccggaaggtaagaaagtcattctggtaggagaatccggtggcggcatcaatattgcactggccgcggagaaatatccggagaaagtgagcgccctcgtctttagcaacgcacttatgcccgatatcgatcacagtccagcgttcgtgtataagaaatatagcgaagttttcactgactggaaagattcgatcttcagcaattatacctacggtaacgacacggttaccgcggtggaattgggagatcgtactctggccgagaacatcttctccaattctccgattgaagatgtagaactggcgaaacatcgtgtccgcaaaggctccttttttctgcaagacttggataccctgccgaactttacgtcggaagggtatggttcaattcgtcgtgtgtatgtttacggcgaagaagaccagatctttagccgcgattttcagttatggcaaattaataattataagcctgataaagtgtactgtgtaccgggggctgaccacaagattatgatcagcaaagtcaacgagctggcccagattctccaagaagttgcaaactctgcgagtgatcttcttgcagtggct

SEQ ID NO: 1136 - protein, 263 aa, synthetic construct
  REGION 1..263: note = Round 4 (Selectivity)
MVSAHFILIHSVCHGAWLWYKLIPLLQSAGHNVTAIDLWASGMNPRQLEQIGTWEQYSEPLFTLIESIPEGKKVILVGESGGGINIALAAEKYPEKVSALVFSNALMPDIDHSPAFVYKKYSEVFTDWKDSIFSNYTYGNDTVTAVELGDRTLAENIFSNSPIEDVELAKHRVRKGSFFLQDLDTLPNFTSEGYGSIRRVYVYGEEDQIFSRDFQLWQINNYKPDKVYCVPGADHKIMISKVNELAQILQEVANSASDLLAVA

SEQ ID NO: 1137 - DNA, 789 bp, synthetic construct
  misc_feature 1..789: note = Round 4 (Selectivity)
  source 1..789: mol_type = other DNA
atggttagtgcgcattttattctgatccacagtatttgccatggcgcctggctgtggtataaactgatcccgttattacagtctgcaggtcataacgttacggcgattgatctttgggctagcgggcagaatcctcgccaactggaacagattggcacatgggagcagtactcagaaccattgttcacgctgatcgaatcgattccggaaggtaagaaagtcattctggtaggagaatccgggggcggcatcaatattgcactggccgcggagaaatatccggagaaagtgagcgccctcgtctttgtgaacgcacttatgcccgatatcgatcacagtccagcgttcgtgtataagaaatatagcgaagttttcactgactggaaagattcgatcttcagcaattatacctacggtaacgacacggttaccgcggtggaattgggagatcgtactctggccgagaacatcttctccaattctccgattgaagatgtagaactggcgaaacatcgtgtccgcaaaggctccttttttgtgcaagacttggataccctgccgaactttacgtcggaagggtatggttcaattcgtcgtgtgtatgtttacggcgaagaagaccagatctttagccgcgattttcagttatggcaaattaataattataagcctgataaagtgtactgtgtaccgggggctgaccacaagattatgatcagccgcgtcaacgagctggcccagattctccaagaagttgcaaactctgcgagtgatcttcttgcagtggct

SEQ ID NO: 1138 - protein, 263 aa, synthetic construct
  REGION 1..263: note = Round 4 (Selectivity)
MVSAHFILIHSICHGAWLWYKLIPLLQSAGHNVTAIDLWASGQNPRQLEQIGTWEQYSEPLFTLIESIPEGKKVILVGESGGGINIALAAEKYPEKVSALVFVNALMPDIDHSPAFVYKKYSEVFTDWKDSIFSNYTYGNDTVTAVELGDRTLAENIFSNSPIEDVELAKHRVRKGSFFVQDLDTLPNFTSEGYGSIRRVYVYGEEDQIFSRDFQLWQINNYKPDKVYCVPGADHKIMISRVNELAQILQEVANSASDLLAVA

SEQ ID NO: 1139 - DNA, 789 bp, synthetic construct
  misc_feature 1..789: note = Round 4 (Selectivity)
  source 1..789: mol_type = other DNA
atggttagtgcgcattttattctgatccacagtatttgccatggcgcctggctgtggtataaactgatcccgttattacagtctgcaggtcataacgttacggcgattgatctttgggctagcgggtcgaatcctcgccaactggaacagattggcacatgggagcagtactcagaaccattgttcaccctgatcgaatcgattccggaaggtaagaaagtcattctggtaggagaatccgggggcggcatcaatattgcactggccgcggagaaatatccggagaaagtgagcgccctcgtctttctgaacgcacttatgcccgatatcgatcacagtccagcgttcgtgtataagaaatatagcgaagttttcactgactggaaagattcgatcttcagcaattatacctacggtaacgacacggttaccgcggtggaattgggagatcgtactctggccgagaacatcttctccaattctccgattgaagatgtagaactggcgaaacatcgtgtccgcaaaggctccttttttgtgcaagacttggataccctgccgaactttacgtcggaagggtatggttcaattcgtcgtgtgtatgtttacggcgaagaagaccagatctttagccgcgattttcagttatggcaaattaataattataagcctgataaagtgtactgtgtaccgagtgctgaccacaagattatgatcagccgcgtcaacgagctggcccagattctccaagaagttgcaaactctgcgagtgatcttcttgcagtggct

SEQ ID NO: 1140 - protein, 263 aa, synthetic construct; identical to SEQ ID NO: 1060
  REGION 1..263: note = Round 4 (Selectivity)

SEQ ID NO: 1141 - DNA, 789 bp, synthetic construct
  misc_feature 1..789: note = Round 4 (Selectivity)
  source 1..789: mol_type = other DNA
atggttagtgcgcattttattctgatccacagtgtttgccatggcgcctggctgtggtataaactgatcccgttattacagtctgcaggtcataacgttacggcgattgatctttgggctagcgggtcgaatcctcgccaactggaacagattggcacatgggagcagtactcagaaccattgttcccgctgatcgaatcgattccggaaggtaagaaagtcattctggtaggagaatccgggggcggcatcaatattgcactggccgcggagaaatatccggagaaagtgagcgccctcgtctttctgaacgcacttatgcccgatatcgatcacagtccagcgttcgtgtataagaaatatagcgaagttttcactgactggaaagattcgatcttcagcaattatacctacggtaacgacacggttaccgcgattgaattgggagatcgtactctggccgagaacatcttctccaattctccgattgaagatgtagaactggcgaaacatcgtgtccgcaaaggctccttttttgagcaagacttggataccctgccgaactttacgtcggaagggtatggttcaattcgtcgtgtgtatgtttacggcgaagaagaccagatctttagccgcgattttcagttatggcaaattaataattataagcctgataaagtgtactgtgtaccgggggctgaccacaagattatgatcagccgcgtcaacgagctggcccagattctccaagaagttgcaaactctgcgagtgatcttcttgcagtggct

SEQ ID NO: 1142 - protein, 263 aa, synthetic construct
  REGION 1..263: note = Round 4 (Selectivity)
MVSAHFILIHSVCHGAWLWYKLIPLLQSAGHNVTAIDLWASGSNPRQLEQIGTWEQYSEPLFPLIESIPEGKKVILVGESGGGINIALAAEKYPEKVSALVFLNALMPDIDHSPAFVYKKYSEVFTDWKDSIFSNYTYGNDTVTAIELGDRTLAENIFSNSPIEDVELAKHRVRKGSFFEQDLDTLPNFTSEGYGSIRRVYVYGEEDQIFSRDFQLWQINNYKPDKVYCVPGADHKIMISRVNELAQILQEVANSASDLLAVA

SEQ ID NO: 1143 - DNA, 789 bp, synthetic construct
  misc_feature 1..789: note = Round 4 (Selectivity)
  source 1..789: mol_type = other DNA
atggttagtgcgcattttattctgatccacagtgtttgccatggcgcctggctgtggtataaactgatcccgttattacagtctgcaggtcataacgttacggcgattgatctttgggctagcgggcagaatcctcgccaactggaacagattggcacatgggagcagtactcagaaccattgttcacgctgatcgaatcgattccggaaggtaagaaagtcattctggtaggagaatccggtggcggcatcaatattgcactggccgcggagaaatatccggagaaagtgagcgccctcgtctttctgaacgcacttatgcccgatatcgatcacagtccagcgttcgtgtataagaaatatagcgaagttttcactgactggaaagattcgatcttcagcaattatacctacggtaacgacacggttaccgcgattgaattgggagatcgtactctggccgagaacatcttctccaattctccgattgaagatgtagaactggcgaaacatcgtgtccgcaaaggctccttctttgagcaagacttggataccctgccgaactttacgtcggaagggtatggttcaattcgtcgtgtgtatgtttacggcgaagaagaccagatctttagccgcgattttcagttatggcaaattaataattataagcctgataaagtgtactgtgtaccgagtgctgaccacaagattatgatcagccgcgtcaacgagctggcccagattctccaagaagttgcaaactctgcgagtgatcttcttgcagtggct

SEQ ID NO: 1144 - protein, 263 aa, synthetic construct
  REGION 1..263: note = Round 4 (Selectivity)
MVSAHFILIHSVCHGAWLWYKLIPLLQSAGHNVTAIDLWASGQNPRQLEQIGTWEQYSEPLFTLIESIPEGKKVILVGESGGGINIALAAEKYPEKVSALVFLNALMPDIDHSPAFVYKKYSEVFTDWKDSIFSNYTYGNDTVTAIELGDRTLAENIFSNSPIEDVELAKHRVRKGSFFEQDLDTLPNFTSEGYGSIRRVYVYGEEDQIFSRDFQLWQINNYKPDKVYCVPSADHKIMISRVNELAQILQEVANSASDLLAVA

SEQ ID NO: 1145 - DNA, 789 bp, synthetic construct
  misc_feature 1..789: note = Round 4 (Selectivity)
  source 1..789: mol_type = other DNA
atggttagtgcgcattttattctgatccacagtgtttgccatggcgcctggctgtggtataaactgatcccgttattacagtctgcaggtcataacgttacggcgattgatctttgggctagcgggagtaatcctcgccaactggaacagattggcacatgggagcagtactcagaaccattgttcacgctgatcgaatcgattccggaaggtaagaaagtcattctggtaggagaatccggtggcggcatcaatattgcactggccgcggagaaatatccggagaaagtgagcgccctcgtctttctgaacgcacttatgcccgatatcgatcacagtccagcgttcgtgtataagaaatatagcgaagttttcactgactggaaagattcgatcttcagcaattatacctacggtaacgacacggttaccgcggtggaattgggagatcgtactctggccgagaacatcttctccaattctccgattgaagatgtagaactggcgaaacatcgtgtccgcaaaggctccttttttgtgcaagacttggataccctgccgaactttacgtcggaagggtatggttcaattcgtcgtgtgtatgtttacggcgaagaagaccagatctttagccgcgattttcagttatggcaaattaataattataagcctgataaagtgtactgtgtaccgagtgctgaccacaagattatgatcagccgcgtcaacgagctggcccagattctccaagaagttgcaaactctgcgagtgatcttcttgcagtggct

SEQ ID NO: 1146 - protein, 263 aa, synthetic construct
  REGION 1..263: note = Round 4 (Selectivity)
MVSAHFILIHSVCHGAWLWYKLIPLLQSAGHNVTAIDLWASGSNPRQLEQIGTWEQYSEPLFTLIESIPEGKKVILVGESGGGINIALAAEKYPEKVSALVFLNALMPDIDHSPAFVYKKYSEVFTDWKDSIFSNYTYGNDTVTAVELGDRTLAENIFSNSPIEDVELAKHRVRKGSFFVQDLDTLPNFTSEGYGSIRRVYVYGEEDQIFSRDFQLWQINNYKPDKVYCVPSADHKIMISRVNELAQILQEVANSASDLLAVA

SEQ ID NO: 1147 - DNA, 789 bp, synthetic construct
  misc_feature 1..789: note = Round 4 (Selectivity)
  source 1..789: mol_type = other DNA
atggttagtgcgcattttattctgatccacagtgtttgccatggcgcctggctgtggtataaactgatcccgttattacagtctgcaggtcataacgttacggcgattgatctttgggctagcgggtcgaatcctcgccaactggaacagattggcacatgggagcagtactcagaaccattgttcacgctgatcgaatcgattccggaaggtaagaaagtcattctggtaggagaatccggtggcggcatcaatattgcactggccgcggagaaatatccggagaaagtgagcgccctcgtctttagcaacgcacttatgcccgatatcgatcacagtccagcgttcgtgtataagaaatatagcgaagttttcactgactggaaagattcgatcttcagcaattatacctacggtaacgacacggttaccgcggtggaattgggagatcgtactctggccgagaacatcttctccaattctccgattgaagatgtagaactggcgaaacatcgtgtccgcaaaggctccttttttctgcaagacttggataccctgccgaactttacgtcggaagggtatggttcaattcgtcgtgtgtatgtttacggcgaagaagaccagatctttagccgcgattttcagttatggcaaattaataattataagcctgataaagtgtactgtgtaccgagtgctgaccacaagattatgatcagccgcgtcaacgagctggcccagattctccaagaagttgcaaactctgcgagtgatcttcttgcagtggct

SEQ ID NO: 1148 - protein, 263 aa, synthetic construct
  REGION 1..263: note = Round 4 (Selectivity)
MVSAHFILIHSVCHGAWLWYKLIPLLQSAGHNVTAIDLWASGSNPRQLEQIGTWEQYSEPLFTLIESIPEGKKVILVGESGGGINIALAAEKYPEKVSALVFSNALMPDIDHSPAFVYKKYSEVFTDWKDSIFSNYTYGNDTVTAVELGDRTLAENIFSNSPIEDVELAKHRVRKGSFFLQDLDTLPNFTSEGYGSIRRVYVYGEEDQIFSRDFQLWQINNYKPDKVYCVPSADHKIMISRVNELAQILQEVANSASDLLAVA

SEQ ID NO: 1149 - DNA, 789 bp, synthetic construct
  misc_feature 1..789: note = Round 4 (Selectivity)
  source 1..789: mol_type = other DNA
atggttagtgcgcattttattctgatccacagtatttgccatggcgcctggctgtggtataaactgatcccgttattacagtctgcaggtcataacgttacggcgattgatctttgggctagcgggatgaatcctcgccaactggaacagattggcacatgggagcagtactcagaaccattgttcacgctgatcgaatcgattccggaaggtaagaaagtcattctggtaggagaatccggtggcggcatcaatattgcactggccgcggagaaatatccggagaaagtgagcgccctcgtctttctgaacgcacttatgcccgatatcgatcacagtccagcgttcgtgtataagaaatatagcgaagttttcactgactggaaagattcgatcttcagcaattatacctacggtaacgacacggttaccgcggtggaattgggagatcgtactctggccgagaacatcttctccaattctccgattgaagatgtagaactggcgaaacatcgtgtccgcaaaggctccttttttgtgcaagacttggataccctgccgaactttacgtcggaagggtatggttcaattcgtcgtgtgtatgtttacggcgaagaagaccagatctttagccgcgattttcagttatggcaaattaataattataagcctgataaagtgtactgtgtaccgagtgctgaccacaagattatgatcagccgcgtcaacgagctggcccagattctccaagaagttgcaaactctgcgagtgatcttcttgcagtggct

SEQ ID NO: 1150 - protein, 263 aa, synthetic construct; identical to SEQ ID NO: 1024
  REGION 1..263: note = Round 4 (Selectivity)

SEQ ID NO: 1151 - DNA, 789 bp, synthetic construct
  misc_feature 1..789: note = Round 4 (Selectivity)
  source 1..789: mol_type = other DNA
atggttagtgcgcattttattctgatccacagtatttgccatggcgcctggctgtggtataaactgatcccgttattacagtctgcaggtcataacgttacggcgattgatctttgggctagcgggtcgaatcctcgccaactggaacagattggcacatgggagcagtactcagaaccattgttcacgctgatcgaatcgattccggaaggtaagaaagtcattctggtaggagaatccgggggcggcatcaatattgcactggccgcggagaaatatccggagaaagtgagcgccctcgtctttctgaacgcacttatgcccgatatcgatcacagtccagcgttcgtgtataagaaatatagcgaagttttcactgactggaaagattcgatcttcagcaattatacctacggtaacgacacggttaccgcgattgaattgggagatcgtactctggccgagaacatcttctccaattctccgattgaagatgtagaactggcgaaacatcgtgtccgcaaaggctccttttttgtgcaagacttggataccctgccgaactttacgtcggaagggtatggttcaattcgtcgtgtgtatgtttacggcgaagaagaccagatctttagccgcgattttcagttatggcaaattaataattataagcctgataaagtgtactgtgtaccgagtgctgaccacaagattatgatcagccgcgtcaacgagctggcccagattctccaagaagttgcaaactctgcgagtgatcttcttgcagtggct

SEQ ID NO: 1152 - protein, 263 aa, synthetic construct
  REGION 1..263: note = Round 4 (Selectivity)
MVSAHFILIHSICHGAWLWYKLIPLLQSAGHNVTAIDLWASGSNPRQLEQIGTWEQYSEPLFTLIESIPEGKKVILVGESGGGINIALAAEKYPEKVSALVFLNALMPDIDHSPAFVYKKYSEVFTDWKDSIFSNYTYGNDTVTAIELGDRTLAENIFSNSPIEDVELAKHRVRKGSFFVQDLDTLPNFTSEGYGSIRRVYVYGEEDQIFSRDFQLWQINNYKPDKVYCVPSADHKIMISRVNELAQILQEVANSASDLLAVA

SEQ ID NO: 1153 - DNA, 789 bp, synthetic construct
  misc_feature 1..789: note = Round 4 (Selectivity)
  source 1..789: mol_type = other DNA
atggttagtgcgcattttattctgatccacagtgtttgccatggcgcctggctgtggtataaactgatcccgttattacagtctgcaggtcataacgttacggcgattgatctttgggctagcgggtcgaatcctcgccaactggaacagattggcacatgggagcagtactcagaaccattgttcacgctgatcgaatcgattccggaaggtaagaaagtcattctggtaggagaatccgggggcggcatcaatattgcactggccgcggagaaatatccggagaaagtgagcgccctcgtctttagcaacgcacttatgcccgatatcgatcacagtccagcgttcgtgtataagaaatatagcgaagttttcactgactggaaagattcgatcttcagcaattatacctacggtaacgacacggttaccgcggtggaattgggagatcgtactctggccgagaacatcttctccaattctccgattgaagatgtagaactggcgaaacatcgtgtccgcaaaggctccttttttctgcaagacttggataccctgccgaactttacgtcggaagggtatggttcaattcgtcgtgtgtatgtttacggcgaagaagaccagatctttagccgcgattttcagttatggcaaattaataattataagcctgataaagtgtactgtgtaccgagtgctgaccacaagattatgatcagcaaagtcaacgagctggcccagattctccaagaagttgcaaactctgcgagtgatcttcttgcagtggct

SEQ ID NO: 1154 - protein, 263 aa, synthetic construct
  REGION 1..263: note = Round 4 (Selectivity)
MVSAHFILIHSVCHGAWLWYKLIPLLQSAGHNVTAIDLWASGSNPRQLEQIGTWEQYSEPLFTLIESIPEGKKVILVGESGGGINIALAAEKYPEKVSALVFSNALMPDIDHSPAFVYKKYSEVFTDWKDSIFSNYTYGNDTVTAVELGDRTLAENIFSNSPIEDVELAKHRVRKGSFFLQDLDTLPNFTSEGYGSIRRVYVYGEEDQIFSRDFQLWQINNYKPDKVYCVPSADHKIMISKVNELAQILQEVANSASDLLAVA

SEQ ID NO: 1155 - DNA, 789 bp, synthetic construct
  misc_feature 1..789: note = Round 4 (Selectivity)
  source 1..789: mol_type = other DNA
atggttagtgcgcattttattctgatccacagtgtttgccatggcgcctggctgtggtataaactgatcccgttattacagtctgcaggtcataacgttacggcgattgatctttgggctagcgggtcgaatcctcgccaactggaacagattggcacatgggagcagtactcagaaccattgttcaccctgatcgaatcgattccggaaggtaagaaagtcattctggtaggagaatccgggggcggcatcaatattgcactggccgcggagaaatatccggagaaagtgagcgccctcgtctttagcaacgcacttatgcccgatatcgatcacagtccagcgttcgtgtataagaaatatagcgaagttttcactgactggaaagattcgatcttcagcaattatacctacggtaacgacacggttaccgcgattgaattgggagatcgtactctggccgagaacatcttctccaattctccgattgaagatgtagaactggcgaaacatcgtgtccgcaaaggctccttttttgagcaagacttggataccctgccgaactttacgtcggaagggtatggttcaattcgtcgtgtgtatgtttacggcgaagaagaccagatctttagccgcgattttcagttatggcaaattaataattataagcctgataaagtgtactgtgtaccgggggctgaccacaagattatgatcagccgcgtcaacgagctggcccagattctccaagaagttgcaaactctgcgagtgatcttcttgcagtggct

SEQ ID NO: 1156 - protein, 263 aa, synthetic construct
  REGION 1..263: note = Round 4 (Selectivity)
MVSAHFILIHSVCHGAWLWYKLIPLLQSAGHNVTAIDLWASGSNPRQLEQIGTWEQYSEPLFTLIESIPEGKKVILVGESGGGINIALAAEKYPEKVSALVFSNALMPDIDHSPAFVYKKYSEVFTDWKDSIFSNYTYGNDTVTAIELGDRTLAENIFSNSPIEDVELAKHRVRKGSFFEQDLDTLPNFTSEGYGSIRRVYVYGEEDQIFSRDFQLWQINNYKPDKVYCVPGADHKIMISRVNELAQILQEVANSASDLLAVA

SEQ ID NO: 1157 - DNA, 789 bp, synthetic construct
  misc_feature 1..789: note = Round 4 (Selectivity)
  source 1..789: mol_type = other DNA
atggttagtgcgcattttattctgatccacagtatttgccatggcgcctggctgtggtataaactgatcccgttattacagtctgcaggtcataacgttacggcgattgatctttgggctagcgggtcgaatcctcgccaactggaacagattggcacatgggagcagtactcagaaccattgttcaccctgatcgaatcgattccggaaggtaagaaagtcattctggtaggagaatccgggggcggcatcaatattgcactggccgcggagaaatatccggagaaagtgagcgccctcgtctttagcaacgcacttatgcccgatatcgatcacagtccagcgttcgtgtataagaaatatagcgaagttttcactgactggaaagattcgatcttcagcaattatacctacggtaacgacacggttaccgcggtggaattgggagatcgtactctggccgagaacatcttctccaattctccgattgaagatgtagaactggcgaaacatcgtgtccgcaaaggctccttttttgtgcaagacttggataccctgccgaactttacgtcggaagggtatggttcaattcgtcgtgtgtatgtttacggcgaagaagaccagatctttagccgcgattttcagttatggcaaattaataattataagcctgataaagtgtactgtgtaccgggggctgaccacaagattatgatcagcaaagtcaacgagctggcccagattctccaagaagttgcaaactctgcgagtgatcttcttgcagtggct

SEQ ID NO: 1158 - protein, 263 aa, synthetic construct
  REGION 1..263: note = Round 4 (Selectivity)
MVSAHFILIHSICHGAWLWYKLIPLLQSAGHNVTAIDLWASGSNPRQLEQIGTWEQYSEPLFTLIESIPEGKKVILVGESGGGINIALAAEKYPEKVSALVFSNALMPDIDHSPAFVYKKYSEVFTDWKDSIFSNYTYGNDTVTAVELGDRTLAENIFSNSPIEDVELAKHRVRKGSFFVQDLDTLPNFTSEGYGSIRRVYVYGEEDQIFSRDFQLWQINNYKPDKVYCVPGADHKIMISKVNELAQILQEVANSASDLLAVA

SEQ ID NO: 1159 - DNA, 789 bp, synthetic construct
  misc_feature 1..789: note = Round 4 (Selectivity)
  source 1..789: mol_type = other DNA
atggttagtgcgcattttattctgatccacagtgtttgccatggcgcctggctgtggtataaactgatcccgttattacagtctgcaggtcataacgttacggcgattgatctttgggctagcgggtcgaatcctcgccaactggaacagattggcacatgggagcagtactcagaaccattgttcaccctgatcgaatcgattccggaaggtaagaaagtcattctggtaggagaatccggtggcggcatcaatattgcactggccgcggagaaatatccggagaaagtgagcgccctcgtctttagcaacgcacttatgcccgatatcgatcacagtccagcgttcgtgtataagaaatatagcgaagttttcactgactggaaagattcgatcttcagcaattatacctacggtaacgacacggttaccgcggtggaattgggagatcgtactctggccgagaacatcttctccaattctccgattgaagatgtagaactggcgaaacatcgtgtccgcaaaggctccttttttgagcaagacttggataccctgccgaactttacgtcggaagggtatggttcaattcgtcgtgtgtatgtttacggcgaagaagaccagatctttagccgcgattttcagttatggcaaattaataattataagcctgataaagtgtactgtgtaccgagtgctgaccacaagattatgatcagccgcgtcaacgagctggcccagattctccaagaagttgcaaactctgcgagtgatcttcttgcagtggct

SEQ ID NO: 1160 - protein, 263 aa, synthetic construct; identical to SEQ ID NO: 1048
  REGION 1..263: note = Round 4 (Selectivity)

SEQ ID NO: 1161 - DNA, 789 bp, synthetic construct
  misc_feature 1..789: note = Round 4 (Selectivity)
  source 1..789: mol_type = other DNA
atggttagtgcgcattttattctgatccacagtatttgccatggcgcctggctgtggtataaactgatcccgttattacagtctgcaggtcataacgttacggcgattgatctttgggctagcgggtcgaatcctcgccaactggaacagattggcacatgggagcagtactcagaaccattgttcaccctgatcgaatcgattccggaaggtaagaaagtcattctggtaggagaatccgggggcggcatcaatattgcactggccgcggagaaatatccggagaaagtgagcgccctcgtctttagcaacgcacttatgcccgatatcgatcacagtccagcgttcgtgtataagaaatatagcgaagttttcactgactggaaagattcgatcttcagcaattatacctacggtaacgacacggttaccgcggtggaattgggagatcgtactctggccgagaacatcttctccaattctccgattgaagatgtagaactggcgaaacatcgtgtccgcaaaggctccttttttgtgcaagacttggataccctgccgaactttacgtcggaagggtatggttcaattcgtcgtgtgtatgtttacggcgaagaagaccagatctttagccgcgattttcagttatggcaaattaataattataagcctgataaagtgtactgtgtaccgggggctgaccacaagattatgatcagccgcgtcaacgagctggcccagattctccaagaagttgcaaactctgcgagtgatcttcttgcagtggct

SEQ ID NO: 1162 - protein, 263 aa, synthetic construct
  REGION 1..263: note = Round 4 (Selectivity)
MVSAHFILIHSICHGAWLWYKLIPLLQSAGHNVTAIDLWASGSNPRQLEQIGTWEQYSEPLFTLIESIPEGKKVILVGESGGGINIALAAEKYPEKVSALVFSNALMPDIDHSPAFVYKKYSEVFTDWKDSIFSNYTYGNDTVTAVELGDRTLAENIFSNSPIEDVELAKHRVRKGSFFVQDLDTLPNFTSEGYGSIRRVYVYGEEDQIFSRDFQLWQINNYKPDKVYCVPGADHKIMISRVNELAQILQEVANSASDLLAVA

SEQ ID NO: 1163 - DNA, 789 bp, synthetic construct
  misc_feature 1..789: note = Round 4 (Selectivity)
  source 1..789: mol_type = other DNA
atggttagtgcgcattttattctgatccacagtgtgtgccatggcgcctggctgtggtataaactgatcccgttattacagtctgcaggtcataacgttacggcgattgatctttgggctagcgggagtaatcctcgccaactggaacagattggcacatgggagcagtactcagaaccattgttcaccctgatcgaatcgattccggaaggtaagaaagtcattctggtaggagaatccggtggcggcatcaatattgcactggccgcggagaaatatccggagaaagtgagcgccctcgtctttagtaacgcacttatgcccgatatcgatcacagtccagcgttcgtgtataagaaatatagcgaagttttcactgactggaaagattcgatcttcagcaattatacctacggtaacgacacggttaccgcggtggaattgggagatcgtactctggccgagaacatcttctccaattctccgattgaagatgtagaactggcgaaacatcgtgtccgcaaaggctccttctttgagcaagacttggataccctgccgaactttacgtcggaagggtatggttcaattcgtcgtgtgtatgtttacggcgaagaagaccagatctttagccgcgattttcagttatggcaaattaataattataagcctgataaagtgtactgtgtaccgagtgctgaccacaagattatgatcagcaaggtcaacgagctggcccagattctccaagaagttgcaaactctgcgagtgatcttcttgcagtggct

SEQ ID NO: 1164 - protein, 263 aa, synthetic construct; identical to SEQ ID NO: 1076
  REGION 1..263: note = Round 4 (Selectivity)

SEQ ID NO: 1165 - DNA, 789 bp, synthetic construct
  misc_feature 1..789: note = Round 4 (Selectivity)
  source 1..789: mol_type = other DNA
atggttagtgcgcattttattctgatccacagtatttgccatggcgcctggctgtggtataaactgatcccgttattacagtctgcaggtcataacgttacggcgattgatctttgggctagcgggagtaatcctcgccaactggaacagattggcacatgggagcagtactcagaaccattgttcaccctgatcgaatcgattccggaaggtaagaaagtcattctggtaggagaatccggtggcggcatcaatattgcactggccgcggagaaatatccggagaaagtgagcgccctcgtctttctgaacgcacttatgcccgatatcgatcacagtccagcgttcgtgtataagaaatatagcgaagttttcactgactggaaagattcgatcttcagcaattatacctacggtaacgacacggttaccgcggtggaattgggagatcgtactctggccgagaacatcttctccaattctccgattgaagatgtagaactggcgaaacatcgtgtccgcaaaggctccttttttgagcaagacttggataccctgccgaactttacgtcggaagggtatggttcaattcgtcgtgtgtatgtttacggcgaagaagaccagatctttagccgcgattttcagttatggcaaattaataattataagcctgataaagtgtactgtgtaccgagtgctgaccacaagattatgatcagccgcgtcaacgagctggcccagattctccaagaagttgcaaactctgcgagtgatcttcttgcagtggct

SEQ ID NO: 1166 - protein, 263 aa, synthetic construct
  REGION 1..263: note = Round 4 (Selectivity)
MVSAHFILIHSICHGAWLWYKLIPLLQSAGHNVTAIDLWASGSNPRQLEQIGTWEQYSEPLFTLIESIPEGKKVILVGESGGGINIALAAEKYPEKVSALVFLNALMPDIDHSPAFVYKKYSEVFTDWKDSIFSNYTYGNDTVTAVELGDRTLAENIFSNSPIEDVELAKHRVRKGSFFEQDLDTLPNFTSEGYGSIRRVYVYGEEDQIFSRDFQLWQINNYKPDKVYCVPSADHKIMISRVNELAQILQEVANSASDLLAVA

SEQ ID NO: 1167 - DNA, 789 bp, synthetic construct
  misc_feature 1..789: note = Round 4 (Selectivity)
  source 1..789: mol_type = other DNA
atggttagtgcgcattttattctgatccacagtgtttgccatggcgcctggctgtggtataaactgatcccgttattacagtctgcaggtcataacgttacggcgattgatctttgggctagcgggtcgaatcctcgccaactggaacagattggcacatgggagcagtactcagaaccattgttcaccctgatcgaatcgattccggaaggtaagaaagtcattctggtaggagaatccgggggcggcatcaatattgcactggccgcggagaaatatccggagaaagtgagcgccctcgtctttagcaacgcacttatgcccgatatcgatcacagtccagcgttcgtgtataagaaatatagcgaagttttcactgactggaaagattcgatcttcagcaattatacctacggtaacgacacggttaccgcgattgaattgggagatcgtactctggccgagaacatcttctccaattctccgattgaagatgtagaactggcgaaacatcgtgtccgcaaaggctccttttttgagcaagacttggataccctgccgaactttacgtcggaagggtatggttcaattcgtcgtgtgtatgtttacggcgaagaagaccagatctttagccgcgattttcagttatggcaaattaataattataagcctgataaagtgtactgtgtaccgagtgctgaccacaagattatgatcagccgcgtcaacgagctggcccagattctccaagaagttgcaaactctgcgagtgatcttcttgcagtggct

SEQ ID NO: 1168 - protein, 263 aa, synthetic construct
  REGION 1..263: note = Round 4 (Selectivity)
MVSAHFILIHSVCHGAWLWYKLIPLLQSAGHNVTAIDLWASGSNPRQLEQIGTWEQYSEPLFTLIESIPEGKKVILVGESGGGINIALAAEKYPEKVSALVFSNALMPDIDHSPAFVYKKYSEVFTDWKDSIFSNYTYGNDTVTAIELGDRTLAENIFSNSPIEDVELAKHRVRKGSFFEQDLDTLPNFTSEGYGSIRRVYVYGEEDQIFSRDFQLWQINNYKPDKVYCVPSADHKIMISRVNELAQILQEVANSASDLLAVA

SEQ ID NO: 1169 - DNA, 789 bp, synthetic construct
  misc_feature 1..789: note = Round 4 (Selectivity)
  source 1..789: mol_type = other DNA
atggttagtgcgcattttattctgatccacagtgtttgccatggcgcctggctgtggtataaactgatcccgttattacagtctgcaggtcataacgttacggcgattgatctttgggctagcgggatgaatcctcgccaactggaacagattggcacatgggagcagtactcagaaccattgttcacgctgatcgaatcgattccggaaggtaagaaagtcattctggtaggagaatccgggggcggcatcaatattgcactggccgcggagaaatatccggagaaagtgagcgccctcgtctttgtgaacgcacttatgcccgatatcgatcacagtccagcgttcgtgtataagaaatatagcgaagttttcactgactggaaagattcgatcttcagcaattatacctacggtaacgacacggttaccgcgattgaattgggagatcgtactctggccgagaacatcttctccaattctccgattgaagatgtagaactggcgaaacatcgtgtccgcaaaggctccttttttgagcaagacttggataccctgccgaactttacgtcggaagggtatggttcaattcgtcgtgtgtatgtttacggcgaagaagaccagatctttagccgcgattttcagttatggcaaattaataattataagcctgataaagtgtactgtgtaccgggggctgaccacaagattatgatcagccgcgtcaacgagctggcccagattctccaagaagttgcaaactctgcgagtgatcttcttgcagtggct

SEQ ID NO: 1170 - protein, 263 aa, synthetic construct
  REGION 1..263: note = Round 4 (Selectivity)
MVSAHFILIHSVCHGAWLWYKLIPLLQSAGHNVTAIDLWASGMNPRQLEQIGTWEQYSEPLFTLIESIPEGKKVILVGESGGGINIALAAEKYPEKVSALVFVNALMPDIDHSPAFVYKKYSEVFTDWKDSIFSNYTYGNDTVTAIELGDRTLAENIFSNSPIEDVELAKHRVRKGSFFEQDLDTLPNFTSEGYGSIRRVYVYGEEDQIFSRDFQLWQINNYKPDKVYCVPGADHKIMISRVNELAQILQEVANSASDLLAVA

SEQ ID NO: 1171 - DNA, 789 bp, synthetic construct
  misc_feature 1..789: note = Round 4 (Selectivity)
  source 1..789: mol_type = other DNA
atggttagtgcgcattttattctgatccacagtgtttgccatggcgcctggctgtggtataaactgatcccgttattacagtctgcaggtcataacgttacggcgattgatctttgggctagcgggtcgaatcctcgccaactggaacagattggcacatgggagcagtactcagaaccattgttcaccctgatcgaatcgattccggaaggtaagaaagtcattctggtaggagaatccgggggcggcatcaatattgcactggccgcggagaaatatccggagaaagtgagcgccctcgtctttagcaacgcacttatgcccgatatcgatcacagtccagcgttcgtgtataagaaatatagcgaagttttcactgactggaaagattcgatcttcagcaattatacctacggtaacgacacggttaccgcggtggaattgggagatcgtactctggccgagaacatcttctccaattctccgattgaagatgtagaactggcgaaacatcgtgtccgcaaaggctccttttttgtgcaagacttggataccctgccgaactttacgtcggaagggtatggttcaattcgtcgtgtgtatgtttacggcgaagaagaccagatctttagccgcgattttcagttatggcaaattaataattataagcctgataaagtgtactgtgtaccgagtgctgaccacaagattatgatcagccgcgtcaacgagctggcccagattctccaagaagttgcaaactctgcgagtgatcttcttgcagtggct

SEQ ID NO: 1172 - protein, 263 aa, synthetic construct
  REGION 1..263: note = Round 4 (Selectivity)
MVSAHFILIHSVCHGAWLWYKLIPLLQSAGHNVTAIDLWASGSNPRQLEQIGTWEQYSEPLFTLIESIPEGKKVILVGESGGGINIALAAEKYPEKVSALVFSNALMPDIDHSPAFVYKKYSEVFTDWKDSIFSNYTYGNDTVTAVELGDRTLAENIFSNSPIEDVELAKHRVRKGSFFVQDLDTLPNFTSEGYGSIRRVYVYGEEDQIFSRDFQLWQINNYKPDKVYCVPSADHKIMISRVNELAQILQEVANSASDLLAVA

SEQ ID NO: 1173 - DNA, 789 bp, synthetic construct
  misc_feature 1..789: note = Round 4 (Selectivity)
  source 1..789: mol_type = other DNA
atggttagtgcgcattttattctgatccacagtgtttgccatggcgcctggctgtggtataaactgatcccgttattacagtctgcaggtcataacgttacggcgattgatctttgggctagcgggtcgaatcctcgccaactggaacagattggcacatgggagcagtactcagaaccattgttcaccctgatcgaatcgattccggaaggtaagaaagtcattctggtaggagaatccgggggcggcatcaatattgcactggccgcggagaaatatccggagaaagtgagcgccctcgtctttgtgaacgcacttatgcccgatatcgatcacagtccagcgttcgtgtataagaaatatagcgaagttttcactgactggaaagattcgatcttcagcaattatacctacggtaacgacacggttaccgcgattgaattgggagatcgtactctggccgagaacatcttctccaattctccgattgaagatgtagaactggcgaaacatcgtgtccgcaaaggctccttttttgagcaagacttggataccctgccgaactttacgtcggaagggtatggttcaattcgtcgtgtgtatgtttacggcgaagaagaccagatctttagccgcgattttcagttatggcaaattaataattataagcctgataaagtgtactgtgtaccgagtgctgaccacaagattatgatcagccgcgtcaacgagctggcccagattctccaagaagttgcaaactctgcgagtgatcttcttgcagtggct

SEQ ID NO: 1174 - protein, 263 aa, synthetic construct
  REGION 1..263: note = Round 4 (Selectivity)
MVSAHFILIHSVCHGAWLWYKLIPLLQSAGHNVTAIDLWASGSNPRQLEQIGTWEQYSEPLFTLIESIPEGKKVILVGESGGGINIALAAEKYPEKVSALVFVNALMPDIDHSPAFVYKKYSEVFTDWKDSIFSNYTYGNDTVTAIELGDRTLAENIFSNSPIEDVELAKHRVRKGSFFEQDLDTLPNFTSEGYGSIRRVYVYGEEDQIFSRDFQLWQINNYKPDKVYCVPSADHKIMISRVNELAQILQEVANSASDLLAVA

SEQ ID NO: 1175 - DNA, 789 bp, synthetic construct
  misc_feature 1..789: note = Round 4 (Selectivity)
  source 1..789: mol_type = other DNA
atggttagtgcgcattttattctgatccacagtgtttgccatggcgcctggctgtggtataaactgatcccgttattacagtctgcaggtcataacgttacggcgattgatctttgggctagcgggcagaatcctcgccaactggaacagattggcacatgggagcagtactcagaaccattgttcacgctgatcgaatcgattccggaaggtaagaaagtcattctggtaggagaatccgggggcggcatcaatattgcactggccgcggagaaatatccggagaaagtgagcgccctcgtctttagcaacgcacttatgcccgatatcgatcacagtccagcgttcgtgtataagaaatatagcgaagttttcactgactggaaagattcgatcttcagcaattatacctacggtaacgacacggttaccgcgattgaattgggagatcgtactctggccgagaacatcttctccaattctccgattgaagatgtagaactggcgaaacatcgtgtccgcaaaggctccttttttgagcaagacttggataccctgccgaactttacgtcggaagggtatggttcaattcgtcgtgtgtatgtttacggcgaagaagaccagatctttagccgcgattttcagttatggcaaattaataattataagcctgataaagtgtactgtgtaccgagtgctgaccacaagattatgatcagccgcgtcaacgagctggcccagattctccaagaagttgcaaactctgcgagtgatcttcttgcagtggct

SEQ ID NO: 1176 - protein, 263 aa, synthetic construct
  REGION 1..263: note = Round 4 (Selectivity)
MVSAHFILIHSVCHGAWLWYKLIPLLQSAGHNVTAIDLWASGQNPRQLEQIGTWEQYSEPLFTLIESIPEGKKVILVGESGGGINIALAAEKYPEKVSALVFSNALMPDIDHSPAFVYKKYSEVFTDWKDSIFSNYTYGNDTVTAIELGDRTLAENIFSNSPIEDVELAKHRVRKGSFFEQDLDTLPNFTSEGYGSIRRVYVYGEEDQIFSRDFQLWQINNYKPDKVYCVPSADHKIMISRVNELAQILQEVANSASDLLAVA

SEQ ID NO: 1177 - DNA, 789 bp, synthetic construct
  misc_feature 1..789: note = Round 4 (Selectivity)
  source 1..789: mol_type = other DNA
atggttagtgcgcattttattctgatccacagtatttgccatggcgcctggctgtggtataaactgatcccgttattacagtctgcaggtcataacgttacggcgattgatctttgggctagcgggtcgaatcctcgccaactggaacagattggcacatgggagcagtactcagaaccattgttcacgctgatcgaatcgattccggaaggtaagaaagtcattctggtaggagaatccggtggcggcatcaatattgcactggccgcggagaaatatccggagaaagtgagcgccctcgtctttagcaacgcacttatgcccgatatcgatcacagtccagcgttcgtgtataagaaatatagcgaagttttcactgactggaaagatagtatcttcagcaattatacctacggtaacgacacggttaccgcggtggaattgggagatcgtactctggccgagaacatcttctccaattctccgattgaagatgtagaactggcgaaacatcgtgtccgcaaaggctccttttttctgcaagacttggataccctgccgaactttacgtcggaagggtatggttcaattcgtcgtgtgtatgtttacggcgaagaagaccagatctttagccgcgattttcagttatggcaaattaataattataagcctgataaagtgtactgtgtaccgagtgctgaccacaagattatgatcagccgcgtcaacgagctggcccagattctccaagaagttgcaaactctgcgagtgatcttcttgcagtggct

SEQ ID NO: 1178 - protein, 263 aa, synthetic construct
  REGION 1..263: note = Round 4 (Selectivity)
MVSAHFILIHSICHGAWLWYKLIPLLQSAGHNVTAIDLWASGSNPRQLEQIGTWEQYSEPLFTLIESIPEGKKVILVGESGGGINIALAAEKYPEKVSALVFSNALMPDIDHSPAFVYKKYSEVFTDWKDSIFSNYTYGNDTVTAVELGDRTLAENIFSNSPIEDVELAKHRVRKGSFFLQDLDTLPNFTSEGYGSIRRVYVYGEEDQIFSRDFQLWQINNYKPDKVYCVPSADHKIMISRVNELAQILQEVANSASDLLAVA

SEQ ID NO: 1179 - DNA, 789 bp, synthetic construct
  misc_feature 1..789: note = Round 4 (Selectivity)
  source 1..789: mol_type = other DNA
atggttagtgcgcattttattctgatccacagtatttgccatggcgcctggctgtggtataaactgatcccgttattacagtctgcaggtcataacgttacggcgattgatctttgggctagcgggatgaatcctcgccaactggaacagattggcacatgggagcagtactcagaaccattgttcccgctgatcgaatcgattccggaaggtaagaaagtcattctggtaggagaatccgggggcggcatcaatattgcactggccgcggagaaatatccggagaaagtgagcgccctcgtctttctgaacgcacttatgcccgatatcgatcacagtccagcgttcgtgtataagaaatatagcgaagttttcactgactggaaagattcgatcttcagcaattatacctacggtaacgacacggttaccgcggtggaattgggagatcgtactctggccgagaacatcttctccaattctccgattgaagatgtagaactggcgaaacatcgtgtccgcaaaggctccttttttgtgcaagacttggataccctgccgaactttacgtcggaagggtatggttcaattcgtcgtgtgtatgtttacggcgaagaagaccagatctttagccgcgattttcagttatggcaaattaataattataagcctgataaagtgtactgtgtaccgggggctgaccacaagattatgatcagccgcgtcaacgagctggcccagattctccaagaagttgcaaactctgcgagtgatcttcttgcagtggct

SEQ ID NO: 1180 - protein, 263 aa, synthetic construct
  REGION 1..263: note = Round 4 (Selectivity)
MVSAHFILIHSICHGAWLWYKLIPLLQSAGHNVTAIDLWASGMNPRQLEQIGTWEQYSEPLFPLIESIPEGKKVILVGESGGGINIALAAEKYPEKVSALVFLNALMPDIDHSPAFVYKKYSEVFTDWKDSIFSNYTYGNDTVTAVELGDRTLAENIFSNSPIEDVELAKHRVRKGSFFVQDLDTLPNFTSEGYGSIRRVYVYGEEDQIFSRDFQLWQINNYKPDKVYCVPGADHKIMISRVNELAQILQEVANSASDLLAVA

SEQ ID NO: 1181 - DNA, 789 bp, synthetic construct
  misc_feature 1..789: note = Round 4 (Selectivity)
  source 1..789: mol_type = other DNA
atggttagtgcgcattttattctgatccacagtatttgccatggcgcctggctgtggtataaactgatcccgttattacagtctgcaggtcataacgttacggcgattgatctttgggctagcgggtcgaatcctcgccaactggaacagattggcacatgggagcagtactcagaaccattgttcaccctgatcgaatcgattccggaaggtaagaaagtcattctggtaggagaatccgggggcggcatcaatattgcactggccgcggagaaatatccggagaaagtgagcgccctcgtctttgtgaacgcacttatgcccgatatcgatcacagtccagcgttcgtgtataagaaatatagcgaagttttcactgactggaaagattcgatcttcagcaattatacctacggtaacgacacggttaccgcggtggaattgggagatcgtactctggccgagaacatcttctccaattctccgattgaagatgtagaactggcgaaacatcgtgtccgcaaaggctccttttttgtgcaagacttggataccctgccgaactttacgtcggaagggtatggttcaattcgtcgtgtgtatgtttacggcgaagaagaccagatctttagccgcgattttcagttatggcaaattaataattataagcctgataaagtgtactgtgtaccgagtgctgaccacaagattatgatcagccgcgtcaacgagctggcccagattctccaagaagttgcaaactctgcgagtgatcttcttgcagtggct

SEQ ID NO: 1182 - protein, 263 aa, synthetic construct
  REGION 1..263: note = Round 4 (Selectivity)
MVSAHFILIHSICHGAWLWYKLIPLLQSAGHNVTAIDLWASGSNPRQLEQIGTWEQYSEPLFTLIESIPEGKKVILVGESGGGINIALAAEKYPEKVSALVFVNALMPDIDHSPAFVYKKYSEVFTDWKDSIFSNYTYGNDTVTAVELGDRTLAENIFSNSPIEDVELAKHRVRKGSFFVQDLDTLPNFTSEGYGSIRRVYVYGEEDQIFSRDFQLWQINNYKPDKVYCVPSADHKIMISRVNELAQILQEVANSASDLLAVA

SEQ ID NO: 1183 - DNA, 789 bp, synthetic construct
  misc_feature 1..789: note = Round 4 (Selectivity)
  source 1..789: mol_type = other DNA
atggttagtgcgcattttattctgatccacagtatttgccatggcgcctggctgtggtataaactgatcccgttattacagtctgcaggtcataacgttacggcgattgatctttgggctagcgggcagaatcctcgccaactggaacagattggcacatgggagcagtactcagaaccattgttcaccctgatcgaatcgattccggaaggtaagaaagtcattctggtaggagaatccgggggcggcatcaatattgcactggccgcggagaaatatccggagaaagtgagcgccctcgtctttctgaacgcacttatgcccgatatcgatcacagtccagcgttcgtgtataagaaatatagcgaagttttcactgactggaaagattcgatcttcagcaattatacctacggtaacgacacggttaccgcggtggaattgggagatcgtactctggccgagaacatcttctccaattctccgattgaagatgtagaactggcgaaacatcgtgtccgcaaaggctccttttttgtgcaagacttggataccctgccgaactttacgtcggaagggtatggttcaattcgtcgtgtgtatgtttacggcgaagaagaccagatctttagccgcgattttcagttatggcaaattaataattataagcctgataaagtgtactgtgtaccgggggctgaccacaagattatgatcagccgcgtcaacgagctggcccagattctccaagaagttgcaaactctgcgagtgatcttcttgcagtggct

SEQ ID NO: 1184 - protein, 263 aa, synthetic construct
  REGION 1..263: note = Round 4 (Selectivity)
MVSAHFILIHSICHGAWLWYKLIPLLQSAGHNVTAIDLWASGQNPRQLEQIGTWEQYSEPLFTLIESIPEGKKVILVGESGGGINIALAAEKYPEKVSALVFLNALMPDIDHSPAFVYKKYSEVFTDWKDSIFSNYTYGNDTVTAVELGDRTLAENIFSNSPIEDVELAKHRVRKGSFFVQDLDTLPNFTSEGYGSIRRVYVYGEEDQIFSRDFQLWQINNYKPDKVYCVPGADHKIMISRVNELAQILQEVANSASDLLAVA

SEQ ID NO: 1185 - DNA, 789 bp, synthetic construct
  misc_feature 1..789: note = Round 4 (Selectivity)
  source 1..789: mol_type = other DNA
atggttagtgcgcattttattctgatccacagtatttgccatggcgcctggctgtggtataaactgatcccgttattacagtctgcaggtcataacgttacggcgattgatctttgggctagcgggatgaatcctcgccaactggaacagattggcacatgggagcagtactcagaaccattgttcaccctgatcgaatcgattccggaaggtaagaaagtcattctggtaggagaatccgggggcggcatcaatattgcactggccgcggagaaatatccggagaaagtgagcgccctcgtctttctgaacgcacttatgcccgatatcgatcacagtccagcgttcgtgtataagaaatatagcgaagttttcactgactggaaagattcgatcttcagcaattatacctacggtaacgacacggttaccgcggtggaattgggagatcgtactctggccgagaacatcttctccaattctccgattgaagatgtagaactggcgaaacatcgtgtccgcaaaggctccttttttgtgcaagacttggataccctgccgaactttacgtcggaagggtatggttcaattcgtcgtgtgtatgtttacggcgaagaagaccagatctttagccgcgattttcagttatggcaaattaataattataagcctgataaagtgtactgtgtaccgagtgctgaccacaagattatgatcagcaaagtcaacgagctggcccagattctccaagaagttgcaaactctgcgagtgatcttcttgcagtggct

SEQ ID NO: 1186 - protein, 263 aa, synthetic construct
  REGION 1..263: note = Round 4 (Selectivity)
MVSAHFILIHSICHGAWLWYKLIPLLQSAGHNVTAIDLWASGMNPRQLEQIGTWEQYSEPLFTLIESIPEGKKVILVGESGGGINIALAAEKYPEKVSALVFLNALMPDIDHSPAFVYKKYSEVFTDWKDSIFSNYTYGNDTVTAVELGDRTLAENIFSNSPIEDVELAKHRVRKGSFFVQDLDTLPNFTSEGYGSIRRVYVYGEEDQIFSRDFQLWQINNYKPDKVYCVPSADHKIMISKVNELAQILQEVANSASDLLAVA

SEQ ID NO: 1187 - DNA, 789 bp, synthetic construct
  misc_feature 1..789: note = Round 4 (Selectivity)
  source 1..789: mol_type = other DNA
atggttagtgcgcattttattctgatccacagtgtttgccatggcgcctggctgtggtataaactgatcccgttattacagtctgcaggtcataacgttacggcgattgatctttgggctagcgggtcgaatcctcgccaactggaacagattggcacatgggagcagtactcagaaccattgttcaccctgatcgaatcgattccggaaggtaagaaagtcattctggtaggagaatccgggggcggcatcaatattgcactggccgcggagaaatatccggagaaagtgagcgccctcgtctttagcaacgcacttatgcccgatatcgatcacagtccagcgttcgtgtataagaaatatagcgaagttttcactgactggaaagattcgatcttcagcaattatacctacggtaacgacacggttaccgcggtggaattgggagatcgtactctggccgagaacatcttctccaattctccgattgaagatgtagaactggcgaaacatcgtgtccgcaaaggctccttttttgtgcaagacttggataccctgccgaactttacgtcggaagggtatggttcaattcgtcgtgtgtatgtttacggcgaagaagaccagatctttagccgcgattttcagttatggcaaattaataattataagcctgataaagtgtactgtgtaccgagtgctgaccacaagattatgatcagcaaagtcaacgagctggcccagattctccaagaagttgcaaactctgcgagtgatcttcttgcagtggct

SEQ ID NO: 1188 - protein, 263 aa, synthetic construct
  REGION 1..263: note = Round 4 (Selectivity)
MVSAHFILIHSVCHGAWLWYKLIPLLQSAGHNVTAIDLWASGSNPRQLEQIGTWEQYSEPLFTLIESIPEGKKVILVGESGGGINIALAAEKYPEKVSALVFSNALMPDIDHSPAFVYKKYSEVFTDWKDSIFSNYTYGNDTVTAVELGDRTLAENIFSNSPIEDVELAKHRVRKGSFFVQDLDTLPNFTSEGYGSIRRVYVYGEEDQIFSRDFQLWQINNYKPDKVYCVPSADHKIMISKVNELAQILQEVANSASDLLAVA

SEQ ID NO: 1189 - DNA, 789 bp, synthetic construct
  misc_feature 1..789: note = Round 4 (Selectivity)
  source 1..789: mol_type = other DNA
atggttagtgcgcattttattctgatccacagtatttgccatggcgcctggctgtggtataaactgatcccgttattacagtctgcaggtcataacgttacggcgattgatctttgggctagcgggagtaatcctcgccaactggaacagattggcacatgggagcagtactcagaaccattgttcaccctgatcgaatcgattccggaaggtaagaaagtcattctggtaggagaatccggtggcggcatcaatattgcactggccgcggagaaatatccggagaaagtgagcgccctcgtctttagtaacgcacttatgcccgatatcgatcacagtccagcgttcgtgtataagaaatatagcgaagttttcactgactggaaagattcgatcttcagcaattatacctacggtaacgacacggttaccgcggtggaattgggagatcgtactctggccgagaacatcttctccaattctccgattgaagatgtagaactggcgaaacattgtgtccgcaaaggctccttctttgagcaagacttggataccctgccgaactttacgtcggaagggtatggttcaattcgtcgtgtgtatgtttacggcgaagaagaccagatctttagccgcgattttcagttatggcaaattaataattataagcctgataaagtgtactgtgtaccgagtgctgaccacaagattatgatcagcaaggtcaacgagctggcccagattctccaagaagttgcaaactctgcgagtgatcttcttgcagtggct

SEQ ID NO: 1190 - protein, 263 aa, synthetic construct
  REGION 1..263: note = Round 4 (Selectivity)
MVSAHFILIHSICHGAWLWYKLIPLLQSAGHNVTAIDLWASGSNPRQLEQIGTWEQYSEPLFTLIESIPEGKKVILVGESGGGINIALAAEKYPEKVSALVFSNALMPDIDHSPAFVYKKYSEVFTDWKDSIFSNYTYGNDTVTAVELGDRTLAENIFSNSPIEDVELAKHCVRKGSFFEQDLDTLPNFTSEGYGSIRRVYVYGEEDQIFSRDFQLWQINNYKPDKVYCVPSADHKIMISKVNELAQILQEVANSASDLLAVA

SEQ ID NO: 1191 - DNA, 789 bp, synthetic construct
  misc_feature 1..789: note = Round 4 (Selectivity)
  source 1..789: mol_type = other DNA
atggttagtgcgcattttattctgatccacagtatttgccatggcgcctggctgtggtataaactgatcccgttattacagtctgcaggtcataacgttacggcgattgatctttgggctagcgggagtaatcctcgccaactggaacagattggcacatgggagcagtactcagaaccattgttcaccctgatcgaatcgattccggaaggtaagaaagtcattctggtaggagaatccggtggcggcatcaatattgcactggccgcggagaaatatccggagaaagtgagcgccctcgtctttagtaacgcacttatgcccgatatcgatcacagtccagcgttcgtggtgaagaaatatagcgaagttttcactgactggaaagattcgatcttcagcaattatacctacggtaacgacacggttaccgcggtggaattgggagatcgtactctggccgagaacatcttctccaattctccgattgaagatgtagaactggcgaaacatcgtgtccgcaaaggctccttctttgagcaagacttggataccctgccgaactttacgtcggaagggtatggttcaattcgtcgtgtgtatgtttacggcgaagaagaccagatctttagccgcgattttcagttatggcaaattaataattataagcctgataaagtgtactgtgtaccgagtgctgaccacaagattatgatcagcaaggtcaacgagctggcccagattctccaagaagttgcaaactctgcgagtgatcttcttgcagtggct

SEQ ID NO: 1192 - protein, 263 aa, synthetic construct
  REGION 1..263: note = Round 4 (Selectivity)
MVSAHFILIHSICHGAWLWYKLIPLLQSAGHNVTAIDLWASGSNPRQLEQIGTWEQYSEPLFTLIESIPEGKKVILVGESGGGINIALAAEKYPEKVSALVFSNALMPDIDHSPAFVVKKYSEVFTDWKDSIFSNYTYGNDTVTAVELGDRTLAENIFSNSPIEDVELAKHRVRKGSFFEQDLDTLPNFTSEGYGSIRRVYVYGEEDQIFSRDFQLWQINNYKPDKVYCVPSADHKIMISKVNELAQILQEVANSASDLLAVA

SEQ ID NO: 1193 - DNA, 789 bp, synthetic construct
  misc_feature 1..789: note = Round 4 (Selectivity)
  source 1..789: mol_type = other DNA
atggttagtgcgcattttattctgatccacagtatttgccatggcgcctggctgtggtataaactgatcccgttattacagtctgcaggtcataacgttacggcgattgatctttgggctagcgggagtaatcctcgccaactggaacagattggcacatgggagcagtactcagaaccattgttcaccctgatcgaatcgattccggaaggtaagaaagtcattctggtaggagaatccggtggcggcatcaatattgcactggccgcggagaaatatccggagaaagtgagcgccctcgtctttagtaacgcacttatgcccgatatcgatcacagtccagcgttcgtgtatcataaatatagcgaagttttcactgactggaaagattcgatcttcagcaattatacctacggtaacgacacggttaccgcggtggaattgggagatcgtactctggccgagaacatcttctccaattctccgattgaagatgtagaactggcgaaacatcgtgtccgcaaaggctccttctttgagcaagacttggataccctgccgaactttacgtcggaagggtatggttcaattcgtcgtgtgtatgtttacggcgaagaagaccagatctttagccgcgattttcagttatggcaaattaataattataagcctgataaagtgtactgtgtaccgagtgctgaccacaagattatgatcagcaaggtcaacgagctggcccagattctccaagaagttgcaaactctgcgagtgatcttcttgcagtggct

SEQ ID NO: 1194 - protein, 263 aa, synthetic construct
  REGION 1..263: note = Round 4 (Selectivity)
MVSAHFILIHSICHGAWLWYKLIPLLQSAGHNVTAIDLWASGSNPRQLEQIGTWEQYSEPLFTLIESIPEGKKVILVGESGGGINIALAAEKYPEKVSALVFSNALMPDIDHSPAFVYHKYSEVFTDWKDSIFSNYTYGNDTVTAVELGDRTLAENIFSNSPIEDVELAKHRVRKGSFFEQDLDTLPNFTSEGYGSIRRVYVYGEEDQIFSRDFQLWQINNYKPDKVYCVPSADHKIMISKVNELAQILQEVANSASDLLAVA

SEQ ID NO: 1195 - DNA, 789 bp, synthetic construct; identical to SEQ ID NO: 1073
  misc_feature 1..789: note = Round 4 (Selectivity)
  source 1..789: mol_type = other DNA

SEQ ID NO: 1196 - protein, 263 aa, synthetic construct; identical to SEQ ID NO: 1074
  REGION 1..263: note = Round 4 (Selectivity)

SEQ ID NO: 1197 - DNA, 789 bp, synthetic construct
  misc_feature 1..789: note = Round 4 (Selectivity)
  source 1..789: mol_type = other DNA
atggttagtgcgcattttattctgatccacagtatttgccatggcgcctggctgtggtataaactgatcccgttattacagtctgcaggtcataacgttacggcgattgatctttgggctagcgggagtaatcctcgccaactggaacagattggcacatgggagcagtactcagaaccattgttcaccctgatcgaatcgattccggaaggtaagaaagtcattctggtaggagaatccggtggcggcatcaatattgcactggccgcggagaaatatccggagaaagtgagcgccctcgtctttagtaacgcacttatgcccgatatcgatcacagtccagcgttcgtgtataagaaatatcatgaagttttcactgactggaaagattcgatcttcagcaattatacctacggtaacgacacggttaccgcggtggaattgggagatcgtactctggccgagaacatcttctccaattctccgattgaagatgtagaactggcgaaacatcgtgtccgcaaaggctccttctttgagcaagacttggataccctgccgaactttacgtcggaagggtatggttcaattcgtcgtgtgtatgtttacggcgaagaagaccagatctttagccgcgattttcagttatggcaaattaataattataagcctgataaagtgtactgtgtaccgagtgctgaccacaagattatgatcagcaaggtcaacgagctggcccagattctccaagaagttgcaaactctgcgagtgatcttcttgcagtggct

SEQ ID NO: 1198 - protein, 263 aa, synthetic construct
  REGION 1..263: note = Round 4 (Selectivity)
MVSAHFILIHSICHGAWLWYKLIPLLQSAGHNVTAIDLWASGSNPRQLEQIGTWEQYSEPLFTLIESIPEGKKVILVGESGGGINIALAAEKYPEKVSALVFSNALMPDIDHSPAFVYKKYHEVFTDWKDSIFSNYTYGNDTVTAVELGDRTLAENIFSNSPIEDVELAKHRVRKGSFFEQDLDTLPNFTSEGYGSIRRVYVYGEEDQIFSRDFQLWQINNYKPDKVYCVPSADHKIMISKVNELAQILQEVANSASDLLAVA

SEQ ID NO: 1199 - DNA, 789 bp, synthetic construct
  misc_feature 1..789: note = Round 4 (Selectivity)
  source 1..789: mol_type = other DNA
atggttagtgcgcattttattctgatccacagtatttgccatggcgcctggctgtggtataaactgatcccgttattacagtctgcaggtcataacgttacggcgattgatctttgggctagcgggagtaatcctcgccaactggaacagattggcacatgggagcagtactcagaaccattgttcaccctgatcgaatcgattccggaaggtaagaaagtcattctggtaggagaatccggtggcggcatcaatattgcactggccgcggagaaatatccggagaaagtgagcgccctcgtctttagtaacgcacttatgcccgatatcgatcacagtccagcgttcgtgtataagaaatatagcgaagttttcactgactggaaagattcgatcttcagcaattatacctacggtaacgacacggttaccgcggtggaattgggagatcgtactctggccgagaacatcttctccaattctccgattgaagatgtagaactggcgaaacatcgtgtccgcaaaggctccttctttgagcaagacttggataccctgccgaactttacgtcggaagggtatggttcaattcgtcgtgtgtatgtttacggcgaagaagaccagatctttagccctgattttcagttatggcaaattaataattataagcctgataaagtgtactgtgtaccgagtgctgaccacaagattatgatcagcaaggtcaacgagctggcccagattctccaagaagttgcaaactctgcgagtgatcttcttgcagtggct

SEQ ID NO: 1200 - protein, 263 aa, synthetic construct
  REGION 1..263: note = Round 4 (Selectivity)
MVSAHFILIHSICHGAWLWYKLIPLLQSAGHNVTAIDLWASGSNPRQLEQIGTWEQYSEPLFTLIESIPEGKKVILVGESGGGINIALAAEKYPEKVSALVFSNALMPDIDHSPAFVYKKYSEVFTDWKDSIFSNYTYGNDTVTAVELGDRTLAENIFSNSPIEDVELAKHRVRKGSFFEQDLDTLPNFTSEGYGSIRRVYVYGEEDQIFSPDFQLWQINNYKPDKVYCVPSADHKIMISKVNELAQILQEVANSASDLLAVA

SEQ ID NO: 1201 - DNA, 789 bp, synthetic construct
  misc_feature 1..789: note = Round 4 (Selectivity)
  source 1..789: mol_type = other DNA
atggttagtgcgcattttattctgatccacagtatttgccatggcgcctggctgtggtataaactgatcccgttattacagtctgcaggtcataacgttacggcgattgatctttgggctagcgggagtaatcctcgccaactggaacagattggcacatgggagcagtactcagaaccattgttcaccctgatcgaatcgattccggaaggtaagaaagtcattctggtaggagaatccggtggcggcatcaatattgcactggccgcggagaaatatccggagaaagtgagcgccctcgtctttagtaacgcacttatgcccgatatcgatcacagtccagcgttcgtgtataagaaatatagcgaagttttcactgactggaaagattcgatcttcagcaattatacctacggtaacgacacggttaccgcggtggaattgggagatcgtactctggccgagaacatcttctccaattctccgattgaagatgtagaactggcgaaacatcgtgtccgcaaaggctccttctttgagcaagacttggataccctgccgaactttacgtcggaagggtatggttcaattcgtcgtgtgtatgtttacggcgaagaagaccagatcttttttcgcgattttcagttatggcaaattaataattataagcctgataaagtgtactgtgtaccgagtgctgaccacaagattatgatcagcaaggtcaacgagctggcccagattctccaagaagttgcaaactctgcgagtgatcttcttgcagtggct

SEQ ID NO: 1202 - protein, 263 aa, synthetic construct
  REGION 1..263: note = Round 4 (Selectivity)
MVSAHFILIHSICHGAWLWYKLIPLLQSAGHNVTAIDLWASGSNPRQLEQIGTWEQYSEPLFTLIESIPEGKKVILVGESGGGINIALAAEKYPEKVSALVFSNALMPDIDHSPAFVYKKYSEVFTDWKDSIFSNYTYGNDTVTAVELGDRTLAENIFSNSPIEDVELAKHRVRKGSFFEQDLDTLPNFTSEGYGSIRRVYVYGEEDQIFFRDFQLWQINNYKPDKVYCVPSADHKIMISKVNELAQILQEVANSASDLLAVA

SEQ ID NO: 1203 - DNA, 789 bp, synthetic construct
  misc_feature 1..789: note = Round 4 (Selectivity)
  source 1..789: mol_type = other DNA
atggttagtgcgcattttattctgatccacagtatttgccatggcgcctggctgtggtataaactgatcccgttattacagtctgcaggtcataacgttacggcgattgatctttgggctagcgggagtaatcctcgccaactggaacagattggcacatgggagcagtactcagaaccattgttcaccctgatcgaatcgattccggaaggtaagaaagtcattctggtaggagaatccggtggcggcatcaatattgcactggccgcggagaaatatccggagaaagtgagcgccctcgtctttagtaacgcacttatgcccgatatcgatcacagtccagcgttcgtgtataagaaatatagcgaagttttcactgactggaaagattcgatcttcagcaattatacctacggtaacgacacggttcatgcggtggaattgggagatcgtactctggccgagaacatcttctccaattctccgattgaagatgtagaactggcgaaacatcgtgtccgcaaaggctccttctttgagcaagacttggataccctgccgaactttacgtcggaagggtatggttcaattcgtcgtgtgtatgtttacggcgaagaagaccagatctttagccgcgattttcagttatggcaaattaataattataagcctgataaagtgtactgtgtaccgagtgctgaccacaagattatgatcagcaaggtcaacgagctggcccagattctccaagaagttgcaaactctgcgagtgatcttcttgcagtggct

SEQ ID NO: 1204 - protein, 263 aa, synthetic construct
  REGION 1..263: note = Round 4 (Selectivity)
MVSAHFILIHSICHGAWLWYKLIPLLQSAGHNVTAIDLWASGSNPRQLEQIGTWEQYSEPLFTLIESIPEGKKVILVGESGGGINIALAAEKYPEKVSALVFSNALMPDIDHSPAFVYKKYSEVFTDWKDSIFSNYTYGNDTVHAVELGDRTLAENIFSNSPIEDVELAKHRVRKGSFFEQDLDTLPNFTSEGYGSIRRVYVYGEEDQIFSRDFQLWQINNYKPDKVYCVPSADHKIMISKVNELAQILQEVANSASDLLAVA

SEQ ID NO: 1205 - DNA, 789 bp, synthetic construct
  misc_feature 1..789: note = Round 4 (Selectivity)
  source 1..789: mol_type = other DNA
atggttagtgcgcattttattctgatccacagtatttgccatggcgcctggctgtggtataaactgatcccgttattacagtctgcaggtcataacgttacggcgattgatctttgggctagcgggagtaatcctcgccaactggaacagattggcacatgggagcagtactcagaaccattgttcaccctgatcgaatcgattccggaaggtaagaaagtcattctggtaggagaatccggtggcggcatcaatattgcactggccgcggagaaatatccggagaaagtgagcgccctcgtctttagtaacgcacttatgcccgatatcgatcacagtccagcgttcgtgttgaagaaatatagcgaagttttcactgactggaaagattcgatcttcagcaattatacctacggtaacgacacggttaccgcggtggaattgggagatcgtactctggccgagaacatcttctccaattctccgattgaagatgtagaactggcgaaacatcgtgtccgcaaaggctccttctttgagcaagacttggataccctgccgaactttacgtcggaagggtatggttcaattcgtcgtgtgtatgtttacggcgaagaagaccagatctttagccgcgattttcagttatggcaaattaataattataagcctgataaagtgtactgtgtaccgagtgctgaccacaagattatgatcagcaaggtcaacgagctggcccagattctccaagaagttgcaaactctgcgagtgatcttcttgcagtggct

SEQ ID NO: 1206 - protein, 263 aa, synthetic construct
  REGION 1..263: note = Round 4 (Selectivity)
MVSAHFILIHSICHGAWLWYKLIPLLQSAGHNVTAIDLWASGSNPRQLEQIGTWEQYSEPLFTLIESIPEGKKVILVGESGGGINIALAAEKYPEKVSALVFSNALMPDIDHSPAFVLKKYSEVFTDWKDSIFSNYTYGNDTVTAVELGDRTLAENIFSNSPIEDVELAKHRVRKGSFFEQDLDTLPNFTSEGYGSIRRVYVYGEEDQIFSRDFQLWQINNYKPDKVYCVPSADHKIMISKVNELAQILQEVANSASDLLAVA

SEQ ID NO: 1207 - DNA, 789 bp, synthetic construct
  misc_feature 1..789: note = Round 4 (Selectivity)
  source 1..789: mol_type = other DNA
atggttagtgcgcattttattctgatccacagtatttgccatggcgcctggctgtggtataaactgatcccgttattacagtctgcaggtcataacgttacggcgattgatctttgggctagcgggagtaatcctcgccaactggaacagattggcacatgggagcagtactcagaaccattgttcaccctgatcgaatcgattccggaaggtaagaaagtcattctggtaggagaatccggtggcggcatcaatattgcactggccgcggagaaatatccggagaaagtgagcgccctcgtctttagtaacgcacttatgcccgatatcgatcacagtccagcgttcgtgtataagaaatatagcgaagttttcactgactggaaagattcgatcttcagcaattatacctacggtaacgacacggttaccgcggtggaattgggagatcgtactctggccgagaacatcttctccctgtctccgattgaagatgtagaactggcgaaacatcgtgtccgcaaaggctccttctttgagcaagacttggataccctgccgaactttacgtcggaagggtatggttcaattcgtcgtgtgtatgtttacggcgaagaagaccagatctttagccgcgattttcagttatggcaaattaataattataagcctgataaagtgtactgtgtaccgagtgctgaccacaagattatgatcagcaaggtcaacgagctggcccagattctccaagaagttgcaaactctgcgagtgatcttcttgcagtggct

SEQ ID NO: 1208 - protein, 263 aa, synthetic construct
  REGION 1..263: note = Round 4 (Selectivity)
MVSAHFILIHSICHGAWLWYKLIPLLQSAGHNVTAIDLWASGSNPRQLEQIGTWEQYSEPLFTLIESIPEGKKVILVGESGGGINIALAAEKYPEKVSALVFSNALMPDIDHSPAFVYKKYSEVFTDWKDSIFSNYTYGNDTVTAVELGDRTLAENIFSLSPIEDVELAKHRVRKGSFFEQDLDTLPNFTSEGYGSIRRVYVYGEEDQIFSRDFQLWQINNYKPDKVYCVPSADHKIMISKVNELAQILQEVANSASDLLAVA

SEQ ID NO: 1209 - DNA, 789 bp, synthetic construct
  misc_feature 1..789: note = Round 4 (Selectivity)
  source 1..789: mol_type = other DNA
atggttagtgcgcattttattctggtgcacagtatttgccatggcgcctggctgtggtataaactgatcccgttattacagtctgcaggtcataacgttacggcgattgatctttgggctagcgggagtaatcctcgccaactggaacagattggcacatgggagcagtactcagaaccattgttcaccctgatcgaatcgattccggaaggtaagaaagtcattctggtaggagaatccggtggcggcatcaatattgcactggccgcggagaaatatccggagaaagtgagcgccctcgtctttagtaacgcacttatgcccgatatcgatcacagtccagcgttcgtgtataagaaatatagcgaagttttcactgactggaaagattcgatcttcagcaattatacctacggtaacgacacggttaccgcggtggaattgggagatcgtactctggccgagaacatcttctccaattctccgattgaagatgtagaactggcgaaacatcgtgtccgcaaaggctccttctttgagcaagacttggataccctgccgaactttacgtcggaagggtatggttcaattcgtcgtgtgtatgtttacggcgaagaagaccagatctttagccgcgattttcagttatggcaaattaataattataagcctgataaagtgtactgtgtaccgagtgctgaccacaagattatgatcagcaaggtcaacgagctggcccagattctccaagaagttgcaaactctgcgagtgatcttcttgcagtggct

SEQ ID NO: 1210 - protein, 263 aa, synthetic construct
  REGION 1..263: note = Round 4 (Selectivity)
MVSAHFILVHSICHGAWLWYKLIPLLQSAGHNVTAIDLWASGSNPRQLEQIGTWEQYSEPLFTLIESIPEGKKVILVGESGGGINIALAAEKYPEKVSALVFSNALMPDIDHSPAFVYKKYSEVFTDWKDSIFSNYTYGNDTVTAVELGDRTLAENIFSNSPIEDVELAKHRVRKGSFFEQDLDTLPNFTSEGYGSIRRVYVYGEEDQIFSRDFQLWQINNYKPDKVYCVPSADHKIMISKVNELAQILQEVANSASDLLAVA

SEQ ID NO: 1211 - DNA, 789 bp, synthetic construct
  misc_feature 1..789: note = Round 4 (Selectivity)
  source 1..789: mol_type = other DNA
atggttagtgcgcattttattctgatccacagtatttgccatggcgcctggctgtggtataaactgatcccgttattacagtctgcaggtcataacgttacggcgattgatctttgggctagcgggagtaatcctcgccaactggaacagattggcacatgggagcagtactcagaaccattgttcaccctgatcgaatcgattccggaaggtaagaaagtcattctggtaggagaatccggtggcggcatcaatattgcactggccgcggagaaatatccggagaaagtgagcgccctcgtctttagtaacgcacttatgcccgatatcgatcacagtccagcgttcgtgtataagaaatatagcgaagttttcactgactggaaagattcgatcttcagcaattatacctacggtaacgacacggttaccgcggtggaattgggagatcgtactctgcgtgagaacatcttctccaattctccgattgaagatgtagaactggcgaaacatcgtgtccgcaaaggctccttctttgagcaagacttggataccctgccgaactttacgtcggaagggtatggttcaattcgtcgtgtgtatgtttacggcgaagaagaccagatctttagccgcgattttcagttatggcaaattaataattataagcctgataaagtgtactgtgtaccgagtgctgaccacaagattatgatcagcaaggtcaacgagctggcccagattctccaagaagttgcaaactctgcgagtgatcttcttgcagtggct

SEQ ID NO: 1212 - protein, 263 aa, synthetic construct
  REGION 1..263: note = Round 4 (Selectivity)
MVSAHFILIHSICHGAWLWYKLIPLLQSAGHNVTAIDLWASGSNPRQLEQIGTWEQYSEPLFTLIESIPEGKKVILVGESGGGINIALAAEKYPEKVSALVFSNALMPDIDHSPAFVYKKYSEVFTDWKDSIFSNYTYGNDTVTAVELGDRTLRENIFSNSPIEDVELAKHRVRKGSFFEQDLDTLPNFTSEGYGSIRRVYVYGEEDQIFSRDFQLWQINNYKPDKVYCVPSADHKIMISKVNELAQILQEVANSASDLLAVA

SEQ ID NO: 1213 - DNA, 789 bp, synthetic construct
  misc_feature 1..789: note = Round 5 (Activity)
  source 1..789: mol_type = other DNA
atggttagtgcgcattttgttctgatccacagtgtttgccatggcgcctggctgtggtataaactgatcccgttattacagtctgcaggtcataacgttacggcgattgatctttgggctagcgggagtaatcctcgccaactggaacagattggcacatgggagcagtactcagaaccattgttcaccctgatcgaatcgattccggaaggtaagaaagtcattctggtaggagaatccggtggcggcatcaatattgcactggccgcggagaaatatccggagaaagttagcgccctcgtctttgtgaacgcacttatgcccgatatcgatcacagtccagcgttcgtgtataagaaatatagcgaagttttcactgactggaaagattcgatcttcagcaattatacctacggtaacgacacggttaccgcggtggaattgggagatcgtactctggccgagaacatctattccaattctccgattgaagatgtagaactggcgaaacatcgtgtccgcaaaggctccttttttctgcaagacttggataccctgccgaactttacgtcggaagggtatggttcaattcgtcgtgtgtatgtctacggcgaagaagaccagatctttagccgcgattttcagttatggcaaattaataattataagcctgataaagtgtactgtgtaccgagtgctgaccacaagattatgatcagccgcgtcaacgagctggcccagattctccaagaagttgcaaactctgcgagtgatcttcttgcagtggct

SEQ ID NO: 1214 - protein, 263 aa, synthetic construct
  REGION 1..263: note = Round 5 (Activity)
MVSAHFVLIHSVCHGAWLWYKLIPLLQSAGHNVTAIDLWASGSNPRQLEQIGTWEQYSEPLFTLIESIPEGKKVILVGESGGGINIALAAEKYPEKVSALVFVNALMPDIDHSPAFVYKKYSEVFTDWKDSIFSNYTYGNDTVTAVELGDRTLAENIYSNSPIEDVELAKHRVRKGSFFLQDLDTLPNFTSEGYGSIRRVYVYGEEDQIFSRDFQLWQINNYKPDKVYCVPSADHKIMISRVNELAQILQEVANSASDLLAVA

SEQ ID NO: 1215 - DNA, 789 bp, synthetic construct
  misc_feature 1..789: note = Round 5 (Activity)
  source 1..789: mol_type = other DNA
atggttgatgcgcattttattctgatccacagtgtttgccatggcgcctggctgtggtataaactgatcccgttattacagtctgcaggtcataacgttacggcgattgatctttgggctagcgggagtaatcctcgccaactggaacagattggcacatgggagcagtactcagaaccattgttcaccctgatcgaatcgattccggaaggtaagaaagtcattctggtaggagaatccggtggcggcatcaatattgcactggccgcggagaaatatccggagaaagtgagcgccctcgtctttgtgaacgcacttatgcccgatatcgatcacagtccagcgttcgtgtataagaaatatagcgaagttttcactgactggaaagattcgatcttcagcaattatacctacggtaacgacacggttaccgcggtggaattgggagatcgtactctggccgagaacatcttctccaattctccgattgaagatgtagaactggcgaaacatcgtgtccgcaaaggctccttttttctgcaagacttggataccctgccgaactttacgtcggaagggtatggttcaattcgtcgtgtgtatgtttacggcgaagaagaccagatctttagccgcgattttcagttatggcaaattaataattataagcctgataaagtgtactgtgtaccgagtgctgaccacaagattatgatcagccgcgtcaacgagctggcccagattctccaagaagttgcaaactctgcgagtgatcttcttgcagtggct

SEQ ID NO: 1216 - protein, 263 aa, synthetic construct
  REGION 1..263: note = Round 5 (Activity)
MVDAHFILIHSVCHGAWLWYKLIPLLQSAGHNVTAIDLWASGSNPRQLEQIGTWEQYSEPLFTLIESIPEGKKVILVGESGGGINIALAAEKYPEKVSALVFVNALMPDIDHSPAFVYKKYSEVFTDWKDSIFSNYTYGNDTVTAVELGDRTLAENIFSNSPIEDVELAKHRVRKGSFFLQDLDTLPNFTSEGYGSIRRVYVYGEEDQIFSRDFQLWQINNYKPDKVYCVPSADHKIMISRVNELAQILQEVANSASDLLAVA

SEQ ID NO: 1217 - DNA, 789 bp, synthetic construct
  misc_feature 1..789: note = Round 5 (Activity)
  source 1..789: mol_type = other DNA
atggttagtgcgcattttattctgatccacagtgtttgccatggcgcctggctgtggtataaactgatcccgttattacagtctgcaggtcataacgttacggcgattgatctttgggctagcgggagtaatcctcgccaactggaacagattggcacatggaggcagtactcagaaccattgttcaccctgatcgaatcgattccggaaggtaagaaagtcattctggtaggagaatccggtggcggcatcaatattgcactggccgcggagaaatatccggagaaagtgagcgccctcgtctttgtgaacgcacttatgcccgatatcgatcacagtccagcgttcgtgtataagaaatatagcgaagttttcactgactggaaagattcgatcttcagcaattatacctacggtaacgacacggttaccgcggtggaattgggagatcgtactctggccgagaacatcttctccaattctccgattgaagatgtagaactggcgaaacatcgtgtccgcaaaggctccttttttctgcaagacttggataccctgccgaactttacgtcggaagggtatggttcaattcgtcgtgtgtatgtttacggcgaagaagaccagatctttagccgcgattttcagttatggcaaattaataattataagcctgataaagtgtactgtgtaccgagtgctgaccacaagattatgatcagccgcgtcaacgagctggcccagattctccaagaagttgcaaactctgcgagtgatcttcttgcagtggct

SEQ ID NO: 1218 - protein, 263 aa, synthetic construct
  REGION 1..263: note = Round 5 (Activity)
MVSAHFILIHSVCHGAWLWYKLIPLLQSAGHNVTAIDLWASGSNPRQLEQIGTWRQYSEPLFTLIESIPEGKKVILVGESGGGINIALAAEKYPEKVSALVFVNALMPDIDHSPAFVYKKYSEVFTDWKDSIFSNYTYGNDTVTAVELGDRTLAENIFSNSPIEDVELAKHRVRKGSFFLQDLDTLPNFTSEGYGSIRRVYVYGEEDQIFSRDFQLWQINNYKPDKVYCVPSADHKIMISRVNELAQILQEVANSASDLLAVA

SEQ ID NO: 1219 - DNA, 789 bp, synthetic construct
  misc_feature 1..789: note = Round 5 (Activity)
  source 1..789: mol_type = other DNA
atggttagtgcgcattttattctgatccacagtgtttgccatggcgcctggctgtggtataaactgatcccgttattacagtctgcaggtcataacgttacggcgattgatctttgggctagcgggagtaatcctcgccaactggaacagattggcacatgggagcagtactcagaaccattgttcaccctgatcgaatcgattccggaaggtaagaaagtcattctggtaggagaatccggtggcggcatcaatattgcactggccgcggagaaatatccggagaaagtgagcgccctcgtctttgtgaacgcacttatgcccgatatcgatcacagtccagcgttcgtggtcaagaaatatagcgaagttttcactgactggaaagattcgatcttcagcaattatacctacggtaacgacacggttaccgcggtggaattgggagatcgtactctggccgagaacatcttctccaattctccgattgaagatgtagaactggcgaaacatctggtccgcaaaggctccttttttgtgcaagacttggataccctgccgaactttacgtcggaagggtatggttcaattcgtcgtgtgtatgtttacggcgaagaagaccagatctttagccgcgattttcagttatggcaaattaataattataagcctgataaagtgtactgtgtaccgagtgctgaccacaagattatgatcagccgcgtcaacgagctggcccagattctccaagaagttgcaaactctgcgagtgatcttcttgcagtggct

SEQ ID NO: 1220 - protein, 263 aa, synthetic construct
  REGION 1..263: note = Round 5 (Activity)
MVSAHFILIHSVCHGAWLWYKLIPLLQSAGHNVTAIDLWASGSNPRQLEQIGTWEQYSEPLFTLIESIPEGKKVILVGESGGGINIALAAEKYPEKVSALVFVNALMPDIDHSPAFVVKKYSEVFTDWKDSIFSNYTYGNDTVTAVELGDRTLAENIFSNSPIEDVELAKHLVRKGSFFVQDLDTLPNFTSEGYGSIRRVYVYGEEDQIFSRDFQLWQINNYKPDKVYCVPSADHKIMISRVNELAQILQEVANSASDLLAVA

SEQ ID NO: 1221 - DNA, 789 bp, synthetic construct
  misc_feature 1..789: note = Round 5 (Activity)
  source 1..789: mol_type = other DNA
atggttagtgcgcattttattctgatccacagtgtttgccatggcgcctggctgtggtataaactgatcccgttattacagtctgcaggtcataacgttacggcgattgatctttgggctagcgggagtaatcctcgccaactggaacagattggcacatgggagcagtactcagaaccattgttcaccctgatcgaatcgattccggaaggtaagaaagtcattctggtaggagaatccggtggcggcatcaatattgcactggccgcggagaaatatccggagaaagtgagcgccctcgtctttgtgaacgcacttatgcccgatatcgatcacagtccagcgttcgtgtataagaaatatagcgaagttttcactgactggaaagattcgatcttcagcaattatacctacggtaacgacacggttaccgcggtggaattgggagatcgtactctggccgagaacatcttctccaattctccgattgaagatgtagaactggcgaaacatcgtgtccgcaaaggctccttttttctgcaagacttggataccctgccgaactttacgtcggaagggtatggttcaattcgtcgtgtgtatgtttacggcgaagaagaccagatctttagccgcgattttcagttatggcaaattaataattatcttcctgataaagtgtactgtgtaccgagtgctgaccacaagattatgatcagccgcgtcaacgagctggcccagattctccaagaagttgcaaactctgcgagtgatcttcttgcagtggct

SEQ ID NO: 1222 - protein, 263 aa, synthetic construct
  REGION 1..263: note = Round 5 (Activity)
MVSAHFILIHSVCHGAWLWYKLIPLLQSAGHNVTAIDLWASGSNPRQLEQIGTWEQYSEPLFTLIESIPEGKKVILVGESGGGINIALAAEKYPEKVSALVFVNALMPDIDHSPAFVYKKYSEVFTDWKDSIFSNYTYGNDTVTAVELGDRTLAENIFSNSPIEDVELAKHRVRKGSFFLQDLDTLPNFTSEGYGSIRRVYVYGEEDQIFSRDFQLWQINNYLPDKVYCVPSADHKIMISRVNELAQILQEVANSASDLLAVA

SEQ ID NO: 1223 - DNA, 789 bp, synthetic construct
  misc_feature 1..789: note = Round 5 (Activity)
  source 1..789: mol_type = other DNA
atggttagtgcgcattttgttctgatccacagtgtttgccatggcgcctggctgtggtataaactgatcccgttattacagtctgcaggtcataacgttacggcgattgatctttgggctagcgggagtaatcctcgccaactggaacagattggcacatgggagcagtactcagaaccattgttcaccctgatcgaatcgatcccggaaggtaaaaaagtcattctggtaggagaatccggtggcggcatcaatattgcactggccgcggagaaatatccggagaaagtgagcgccctcgtctttgtgaacgcacttatgcccgatatcgatcacagtccagcgttcgtgtataagaaatatagcgaagttttcactgactggaaagattcgatcttcagcaattatacctacggtaacgacacggttaccgcggtggaattgggagatcgtactctggccgagaacatctattccaattctccgattgaagatgtagaactggcgaaacatcgtgtccgcaaaggctccttttttctgcaagacttggataccctgccgaactttacgtcggaagggtatggttcagttcgtcgtgtgtatatctacggcgaagaagaccagatctttagccgcgattttcagttatggcaaattaataattataagcctgataaagtgtactgtgtaccgagtgctgaccacaagattatgatcagccgcgtcaacgagctggcccagattctccaagaagttgcaaactctgcgagtgatcttcttgcagtggct

SEQ ID NO: 1224 - protein, 263 aa, synthetic construct
  REGION 1..263: note = Round 5 (Activity)
MVSAHFVLIHSVCHGAWLWYKLIPLLQSAGHNVTAIDLWASGSNPRQLEQIGTWEQYSEPLFTLIESIPEGKKVILVGESGGGINIALAAEKYPEKVSALVFVNALMPDIDHSPAFVYKKYSEVFTDWKDSIFSNYTYGNDTVTAVELGDRTLAENIYSNSPIEDVELAKHRVRKGSFFLQDLDTLPNFTSEGYGSVRRVYIYGEEDQIFSRDFQLWQINNYKPDKVYCVPSADHKIMISRVNELAQILQEVANSASDLLAVA

SEQ ID NO: 1225 - DNA, 789 bp, synthetic construct
  misc_feature 1..789: note = Round 5 (Activity)
  source 1..789: mol_type = other DNA
atggttagtgcgcattttattctgatccacagtgtttgccatggcgcctggctgtggtataaactgatcccgttattacagtctgcaggtcataacgttacggcgattgatctttgggctagcgggagtaatcctcgccaactggaacagattggcacatgggagcagtactcagaaccattgttcaccctgatcgaatcgattccggaaggtaagaaagtcattctggtaggagaatccggtggcggcatcaatattgcactggccgcggagaaatatccggagaaagtgagcgccctcgtctttgtgaacgcacttatgcccgatatcgatcacagtccagcgttcgtgtataagaaatatagcgaagttttcactgactggaaagattcgatcttcagcaattatacctacggtaacgacacggttactgcggttgaattgggagatcgtactctgcgtgagaacatcttctccaattctccgattgaagatgtagaactggcgaaacatcgtgtccgcaaaggctccttttttctgcaagacttggataccctgccgaactttacgtcggaagggtatggttcaattcgtcgtgtgtatgtttacggcgaagaagaccagatctttagccgcgattttcagttatggcaaattaataattataagcctgataaagtgtactgtgtaccgagtgctgaccacaagattatgatcagccgcgtcaacgagctggcccagattctccaagaagttgcaaactctgcgagtgatcttcttgcagtggct

SEQ ID NO: 1226 - protein, 263 aa, synthetic construct
  REGION 1..263: note = Round 5 (Activity)
MVSAHFILIHSVCHGAWLWYKLIPLLQSAGHNVTAIDLWASGSNPRQLEQIGTWEQYSEPLFTLIESIPEGKKVILVGESGGGINIALAAEKYPEKVSALVFVNALMPDIDHSPAFVYKKYSEVFTDWKDSIFSNYTYGNDTVTAVELGDRTLRENIFSNSPIEDVELAKHRVRKGSFFLQDLDTLPNFTSEGYGSIRRVYVYGEEDQIFSRDFQLWQINNYKPDKVYCVPSADHKIMISRVNELAQILQEVANSASDLLAVA

SEQ ID NO: 1227 - DNA, 789 bp, synthetic construct
  misc_feature 1..789: note = Round 5 (Activity)
  source 1..789: mol_type = other DNA
atggttagtgcgcattttattctgatccacagtgtttgccatggcgcctggctgtggtataaactgatcccgttattacagtctgcaggtcataacgttacggcgattgatctttgggctagcgggagtaatcctcgccaactggaacagattggcacatgggagcagtactcagaaccattgttcaccctgatcgaatcgattccggaaggtaagaaagtcattctggtaggagaatccggtggcggcatcaatattgcactggccgcggagaaatatccggagaaagtgagcgccctcgtctttctgaacgcacttatgcccgatatcgatcacagtccagcgttcgtgtataagaaatatagcgaagttttcactgactggaaagattcgatcttcagcaattatacctacggtaacgacacggttaccgcggtggaattgggagatcgtactctgcgtgagaacatcttctccaattctccgattgaagatgtagaactggcgaaacatcgtgtccgcaaaggctccttttttctgcaagacttggataccctgccgaactttacgtcggaagggtatggttcaattcgtcgtgtgtatgtttacggcgaagaagaccagatctttagccgcgattttcagttatggcaaattaataattataagcctgataaagtgtactgtgtaccgagtgctgaccacaagattatgatcagccgcgtcaacgagctggcccagattctccaagaagttgcaaactctgcgagtgatcttcttgcagtggct

SEQ ID NO: 1228 - protein, 263 aa, synthetic construct
  REGION 1..263: note = Round 5 (Activity)
MVSAHFILIHSVCHGAWLWYKLIPLLQSAGHNVTAIDLWASGSNPRQLEQIGTWEQYSEPLFTLIESIPEGKKVILVGESGGGINIALAAEKYPEKVSALVFLNALMPDIDHSPAFVYKKYSEVFTDWKDSIFSNYTYGNDTVTAVELGDRTLRENIFSNSPIEDVELAKHRVRKGSFFLQDLDTLPNFTSEGYGSIRRVYVYGEEDQIFSRDFQLWQINNYKPDKVYCVPSADHKIMISRVNELAQILQEVANSASDLLAVA

SEQ ID NO: 1229 - DNA, 789 bp, synthetic construct
  misc_feature 1..789: note = Round 5 (Activity)
  source 1..789: mol_type = other DNA
atggttagtgcgcattttattctgatccacagtgtttgccatggcgcctggctgtggtataaactgatcccgttattacagtctgcaggtcataacgttacggcgattgatctttgggctagcgggagtaatcctcgccaactggaacagattggcacatgggagcagtactcagaaccattgttcaccctgatcgaatcgattccggaaggtaagaaagtcattctggtaggagaatccggtggcggcatcaatattgcactggccgcggagaaatatccggagaaagtgagcgccctcgtctttctgaacgcacttatgcccgatatcgatcacagtccagcgttcgtgtataagaaatatagcgaagttttcactgactggaaagattcgatcttcagcaattatacctacggtaacgacacggttaccgcggtggaattgggagatcgtactctggccgagaacatcttctccaattctccgattgaagatgtagaactggcgaaacatcgtgtccgcaaaggctccttttttctgcaagacttggataccctgccgaactttacgtcggaagggtatggttcaattcgtcgtgtgtatgtttacggcgaagaagaccagatctttagccgcgattttcagttatggcaaattaataattataagcctgataaagtgtactgtgtaccgagtgctgaccacaagattatgatcagccgcgtcaacgagctggcccagattctccaagaagttgcaaactctgcgagtgatcttcttgcagtggct

SEQ ID NO: 1230 - protein, 263 aa, synthetic construct; identical to SEQ ID NO: 1070
  REGION 1..263: note = Round 5 (Activity)

SEQ ID NO: 1231 - DNA, 789 bp, synthetic construct
  misc_feature 1..789: note = Round 5 (Activity)
  source 1..789: mol_type = other DNA
atggttagtgcgcattttattctgatccacagtgtttgccatggcgcctggctgtggtataaactgatcccgttattacagtctgcaggtcataacgttacggcgattgatctttgggctagcgggagtaatcctcgccaactggaacagattggcacatgggagcagtactcagaaccattgttcaccctgatcgaatcgattccggaaggtaagaaagtcattctggtaggagaatccggtggcggcatcaatattgcactggccgcggagaaatatccggagaaagtgagcgccctcgtctttctgaacgcacttatgcccgatatcgatcacagtccagcgttcgtgtataagaaatatagcgaagttttcactgactggaaagattcgatcttcagcaattatacctacggtaacgacacggttgtagcgattgaattgggagatcgtactctggccgagaacatcttctccaattctccgattgaagatgtagaactggcgaaacatctggtccgcaaaggctccttttttgtgcaagacttggataccctgccgaactttacgtcggaagggtatggttcaattcgtcgtgtgtatgtttacggcgaagaagaccagatctttagccgcgattttcagttatggcaaattaataattataagcctgataaagtgtactgtgtaccgagtgctgaccacaagattatgatcagccgcgtcaacgagctggcccagattctccaagaagttgcaaactctgcgagtgatcttcttgcagtggct

SEQ ID NO: 1232 - protein, 263 aa, synthetic construct
  REGION 1..263: note = Round 5 (Activity)
MVSAHFILIHSVCHGAWLWYKLIPLLQSAGHNVTAIDLWASGSNPRQLEQIGTWEQYSEPLFTLIESIPEGKKVILVGESGGGINIALAAEKYPEKVSALVFLNALMPDIDHSPAFVYKKYSEVFTDWKDSIFSNYTYGNDTVVAIELGDRTLAENIFSNSPIEDVELAKHLVRKGSFFVQDLDTLPNFTSEGYGSIRRVYVYGEEDQIFSRDFQLWQINNYKPDKVYCVPSADHKIMISRVNELAQILQEVANSASDLLAVA

SEQ ID NO: 1233 - DNA, 789 bp, synthetic construct
  misc_feature 1..789: note = Round 5 (Activity)
  source 1..789: mol_type = other DNA
atggttagtgcgcattttattctgatccacagtgtttgccatggcgcctggctgtggtataaactgatcccgttattagaatctgcaggtcataacgttacggcgattgatctttgggctagcgggatcaatcctcgccaactggaacagattggcacatgggagcagtactcagaaccattgttcaccctgatcgaatcgattccggaaggtaagaaagtcattctggtaggagaatccggtggcggcatcaatattgcactggccgcggagaaatatccggagaaagtgagcgccctcgtctttgtgaacgcacttatgcccgatatcgatcacagtccagcgttcgtgtataagaaatatagcgaagttttcactgactggaaagattcgatcttcagcaattatacctacggtaacgacacggttaccgcggtggaattgggagatcgtactctggccgagaacatcttctccaattctccgattgaagatgtagaactggcgaaacatctggtccgcaaaggctccttttttctgcaagacttggataccctgccgaactttacgtcggaagggtatggttcaattcgtcgtgtgtatgtttacggcgaagaagaccagatctttagccgcgattttcagttatggcaaattaataattataagcctgataaagtgtactgtgtaccgagtgctgaccacaagattatgatcagccgcgtcaacgagctggcccagattctccaagaagtcgcaaactctgcgagtgatcttcttgcagtggct

SEQ ID NO: 1234 - protein, 263 aa, synthetic construct
  REGION 1..263: note = Round 5 (Activity)
MVSAHFILIHSVCHGAWLWYKLIPLLESAGHNVTAIDLWASGINPRQLEQIGTWEQYSEPLFTLIESIPEGKKVILVGESGGGINIALAAEKYPEKVSALVFVNALMPDIDHSPAFVYKKYSEVFTDWKDSIFSNYTYGNDTVTAVELGDRTLAENIFSNSPIEDVELAKHLVRKGSFFLQDLDTLPNFTSEGYGSIRRVYVYGEEDQIFSRDFQLWQINNYKPDKVYCVPSADHKIMISRVNELAQILQEVANSASDLLAVA

SEQ ID NO: 1235 - DNA, 789 bp, synthetic construct
  misc_feature 1..789: note = Round 5 (Activity)
  source 1..789: mol_type = other DNA
atggttagtgcgcattttattctgatccacagtgtttgccatggcgcctggctgtggtataaactgatcccgttattacagtctgcaggtcataacgttacggcgattgatctttgggctagcgggagtaatcctcgccaactggaacagattggcacatgggagcagtactcaactccattgttcaccctgatcgaatcgattccggaaggtaagaaagtcattctggtaggagaatccggtggcggcatcaatattgcactggccgcggagaaatatccggagaaagtgagcgccctcgtctttgtgaacgcacttatgcccgatatcgatcacagtccagcgttcgtgtataagaaatatagcgaagttttcactgactggaaagattcgatcttcagcaattatacctacggtaacgacacggttaccgcggtggaattgggagatcgtactctggccgagaacatcttctccaattctccgattgaagatgtagaactggcgaaacatcgtgtccgcaaaggctccttttttctgcaagacttggataccctgccgaactttacgtcggaagggtatggttcaattcgtcgtgtgtatgtttacggcgaagaagaccagatctttagccgcgattttcagttatggcaaattaataattataagcctgataaagtgtactgtgtaccgagtgctgaccacaagattatgatcagccgcgtcaacgagctggcccagattctccaagaagttgcaaactctgcgagtgatcttcttgcagtggct

SEQ ID NO: 1236 - protein, 263 aa, synthetic construct
  REGION 1..263: note = Round 5 (Activity)
MVSAHFILIHSVCHGAWLWYKLIPLLQSAGHNVTAIDLWASGSNPRQLEQIGTWEQYSTPLFTLIESIPEGKKVILVGESGGGINIALAAEKYPEKVSALVFVNALMPDIDHSPAFVYKKYSEVFTDWKDSIFSNYTYGNDTVTAVELGDRTLAENIFSNSPIEDVELAKHRVRKGSFFLQDLDTLPNFTSEGYGSIRRVYVYGEEDQIFSRDFQLWQINNYKPDKVYCVPSADHKIMISRVNELAQILQEVANSASDLLAVA

SEQ ID NO: 1237 - DNA, 789 bp, synthetic construct
  misc_feature 1..789: note = Round 5 (Activity)
  source 1..789: mol_type = other DNA
atggttagtgcgcattttattctgatccacagtgtttgccatggcgcctggctgtggtataaactgatcccgttattacagtctgcaggtcataacgttacggcgattgatctttgggctagcgggagtaatcctcgccaaattgaacagattggcacatgggagcagtactcagaaccattgttcaccctgattgaatcgattccggaaggtaagaaagtcattctggtaggagaatccggtggcggcatcaatattgcactggccgcggagaaatatccggagaaagtgagcgccctcgtctttgtgaacgcacttatgcccgatatcgatcacagtccagcgttcgtgtataagaaatatagcgaagttttcactgactggaaagattcgatcttcagcaattatacctacggtaacgacacggttaccgcggtggaattgggagatcgtactctggccgagaacatcttctccaattctccgattgaagatgtagaactggcgaaacatctggtccgcaaaggctccttttttctgcaagacttggataccctgccgaactttacgtcggaagggtatggttcaattcgtcgtgtgtatgtttacggtgaagaagaccagatctttagccgcgattttcagttatggcaaattaataattataagcctgataaagtgtactgtgtaccgagtgctgaccacaagattatgatcagccgcgtcaacgagctggcccagattctccaagaagttgcaaactctgcgagtgatcttcttgcagtggct

SEQ ID NO: 1238 - protein, 263 aa, synthetic construct
  REGION 1..263: note = Round 5 (Activity)
MVSAHFILIHSVCHGAWLWYKLIPLLQSAGHNVTAIDLWASGSNPRQIEQIGTWEQYSEPLFTLIESIPEGKKVILVGESGGGINIALAAEKYPEKVSALVFVNALMPDIDHSPAFVYKKYSEVFTDWKDSIFSNYTYGNDTVTAVELGDRTLAENIFSNSPIEDVELAKHLVRKGSFFLQDLDTLPNFTSEGYGSIRRVYVYGEEDQIFSRDFQLWQINNYKPDKVYCVPSADHKIMISRVNELAQILQEVANSASDLLAVA

SEQ ID NO: 1239 - DNA, 789 bp, synthetic construct
  misc_feature 1..789: note = Round 5 (Activity)
  source 1..789: mol_type = other DNA
atggttagtgcgcattttattctgatccacagtgtttgccatggcgcctggctgtggtataaactgatcccgttattacagtctgcaggtcataacgttacggcgattgatctttgggctagcgggagtaatcctcgccaactggaacagattggcacatgggctcagtactcagaaccattgttcaccctgatcgaatcgattccggaaggtaagaaagtcattctggtaggagaatccggtggcggcatcaatattgcactggccgcggagaaatatccggagaaagtgagcgccctcgtctttgtgaacgcacttatgcccgatatcgatcacagtccagcgttcgtgtataagaaatatagcgaagttttcactgactggaaagattcgatcttcagcaattatacctacggtaacgacacggttaccgcggtggaattgggagatcgtactctggccgagaacatcttctccaattctccgattgaagatgtagaactggcgaaacatcgtgtccgcaaaggctccttttttctgcaagacttggataccctgccgaactttacgtcggaagggtatggttcaattcgtcgtgtgtatgtttacggcgaagaagaccagatctttagccgcgattttcagttatggcaaattaataattataagcctgataaagtgtactgtgtaccgagtgctgaccacaagattatgatcagccgcgtcaacgagctggcccagattctccaagaagttgcaaactctgcgagtgatcttcttgcagtggct

SEQ ID NO: 1240 - protein, 263 aa, synthetic construct
  REGION 1..263: note = Round 5 (Activity)
MVSAHFILIHSVCHGAWLWYKLIPLLQSAGHNVTAIDLWASGSNPRQLEQIGTWAQYSEPLFTLIESIPEGKKVILVGESGGGINIALAAEKYPEKVSALVFVNALMPDIDHSPAFVYKKYSEVFTDWKDSIFSNYTYGNDTVTAVELGDRTLAENIFSNSPIEDVELAKHRVRKGSFFLQDLDTLPNFTSEGYGSIRRVYVYGEEDQIFSRDFQLWQINNYKPDKVYCVPSADHKIMISRVNELAQILQEVANSASDLLAVA

SEQ ID NO: 1241 - DNA, 789 bp, synthetic construct
  misc_feature 1..789: note = Round 5 (Activity)
  source 1..789: mol_type = other DNA
atggttagtgcgcattttattctgatccacagtgtttgccatggcgcctggctgtggtataaactgatcccgttattacagtctgcaggtcataacgttacggcgattgatctttgggctagcgggagtaatcctcgccaactggaacagattggcacatgggagcagtactcagaaccattgttcaccctgatcgaatcgattccggaaggtaagaaagtcattctggtaggagaatccggtggcggcatcaatattgcactggccgcggagaaatatccggagaaagtgagcgccctcgtctttgtgaacgcacttatgcccgatatcgatcacagtccagcgttcgtgtataagaaatatagcgaagttttcactgactggaaagattcgatcttcagcaattatacctacggtaacgacacggttactgcgattgaattgggagatcgtactctggccgagaacatcttctccaattctccgattgaagatgtagaactggcgaaacatcgtgtccgcaaaggctccttttttctgcaagacttggataccctgccgaactttacgtcggaagggtatggttcaattcgtcgtgtgtatgtttacggcgaagaagaccagatctttagccgcgattttcagttatggcaaattaataattataagcctgataaagtgtactgtgtaccgagtgctgaccacaagattatgatcagccgcgtcaacgagctggcccagattctccaagaagttgcaaactctgcgagtgatcttcttgcagtggct

SEQ ID NO: 1242 - protein, 263 aa, synthetic construct
  REGION 1..263: note = Round 5 (Activity)
MVSAHFILIHSVCHGAWLWYKLIPLLQSAGHNVTAIDLWASGSNPRQLEQIGTWEQYSEPLFTLIESIPEGKKVILVGESGGGINIALAAEKYPEKVSALVFVNALMPDIDHSPAFVYKKYSEVFTDWKDSIFSNYTYGNDTVTAIELGDRTLAENIFSNSPIEDVELAKHRVRKGSFFLQDLDTLPNFTSEGYGSIRRVYVYGEEDQIFSRDFQLWQINNYKPDKVYCVPSADHKIMISRVNELAQILQEVANSASDLLAVA

SEQ ID NO: 1243 - DNA, 789 bp, synthetic construct
  misc_feature 1..789: note = Round 5 (Activity)
  source 1..789: mol_type = other DNA
atggttagtgcgcattttattctgatccacagtgtttgccatggcgcctggctgtggtataaactgatcccgttattacagtctgcaggtcataacgttacggcgattgatctttgggctagcgggagtaatcctcgccaactggaacagattggcacatgggagcagtactcagaaccattgttcaccctgatcgaatcgattccggaaggtaagaaagtcattctggtaggagaatccggtggcggcatcaatattgcactggccgcggagaaatatccggagaaagtgagcgccctcgtctttgtgaacgcacttatgcccgatatcgatcacagtccagcgttcgtgtataagaaatatagcgaagttttcactgactggaaagattcgatcttcagcaattatacctacggtaacgacacggttaccgcggtggaattgggagatcgtactctggccgagaacatcttctccaattctccgattgaagatgtagaactggcgaaacatcgtgtccgcaaaggctccttttttctgcaagacttggataccctgccgaactttacgtcggaagggtatggttcaattcgtcgtgtgtatgtttacggcgaagaagaccagatctttagccgcgattttcagttatggcaaattaataattataagcctgatgtggtgtactgtgtaccgagtgctgaccacaagattatgatcagccgcgtcaacgagctggcccagattctccaagaagttgcaaactctgcgagtgatcttcttgcagtggct

SEQ ID NO: 1244 - protein, 263 aa, synthetic construct
  REGION 1..263: note = Round 5 (Activity)
MVSAHFILIHSVCHGAWLWYKLIPLLQSAGHNVTAIDLWASGSNPRQLEQIGTWEQYSEPLFTLIESIPEGKKVILVGESGGGINIALAAEKYPEKVSALVFVNALMPDIDHSPAFVYKKYSEVFTDWKDSIFSNYTYGNDTVTAVELGDRTLAENIFSNSPIEDVELAKHRVRKGSFFLQDLDTLPNFTSEGYGSIRRVYVYGEEDQIFSRDFQLWQINNYKPDVVYCVPSADHKIMISRVNELAQILQEVANSASDLLAVA

SEQ ID NO: 1245 - DNA, 789 bp, synthetic construct
  misc_feature 1..789: note = Round 5 (Activity)
  source 1..789: mol_type = other DNA
atggttagtgcgcattttgttctgatccacagtgtttgccatggcgcctggctgtggtataaactgatcccgttattacagtctgcaggtcataacgttacggcgattgatctttgggctagcgggagtaatcctcgccaactggaacagattggcacatgggagcagtactcagaaccattgttcaccctgatcgaatcgatcccggaaggtaaaaaagtcattctggtaggagaatccggtggcggcatcaatattgcactggccgcggagaaatatccggagaaagttagcgccctcgtctttgtgaacgcacttatgcccgatatcgatcacagtccagcgttcgtgtataagaaatatagcgaagttttcactgactggaaagattcgatcttcagcaattatacctacggtaacgacacggttaccgcggtggaattgggagatcgtactctggccgagaacatcttttccaattctccgattgaagatgtagaactggcgaaacatcgtgtccgcaaaggctccttttttctgcaagacttggataccctgccgaactttacgtcggaagggtatggttcaattcgtcgtgtgtatgtttacggcgaagaagaccagatctttagccgcgattttcagttatggcaaattaataattataagcctgataaagtgtactgtgtaccgagtgctgaccacaagattatgatcagccgcgtcaacgagctggcccagattctccaagaagttgcaaactctgcgagtgatcttcttgcagtggct

SEQ ID NO: 1246 - protein, 263 aa, synthetic construct
  REGION 1..263: note = Round 5 (Activity)
MVSAHFVLIHSVCHGAWLWYKLIPLLQSAGHNVTAIDLWASGSNPRQLEQIGTWEQYSEPLFTLIESIPEGKKVILVGESGGGINIALAAEKYPEKVSALVFVNALMPDIDHSPAFVYKKYSEVFTDWKDSIFSNYTYGNDTVTAVELGDRTLAENIFSNSPIEDVELAKHRVRKGSFFLQDLDTLPNFTSEGYGSIRRVYVYGEEDQIFSRDFQLWQINNYKPDKVYCVPSADHKIMISRVNELAQILQEVANSASDLLAVA

SEQ ID NO: 1247 - DNA, 789 bp, synthetic construct
  misc_feature 1..789: note = Round 5 (Activity)
  source 1..789: mol_type = other DNA
atggttagtgcgcattttattctgatccacagtgtttgccatggcgcctggctgtggtataaactgatcccgttattacagtctgcaggtcatggggttacggcgattgatctttgggctagcgggagtaatcctcgccaactggaacagattggcacatgggagcagtactcagaaccattgttcaccctgatcgaatcgattccggaaggtaagaaagtcattctggtaggagaatccggtggcggcatcaatattgcactggccgcggagaaatatccggagaaagtgagcgccctcgtctttgtgaacgcacttatgcccgatatcgatcacagtccagcgttcgtgtataagaaatatagcgaagttttcactgactggaaagattcgatcttcagcaattatacctacggtaacgacacggttaccgcggtggaattgggagatcgtactctggccgagaacatcttctccaattctccgattgaagatgtagaactggcgaaacatcgtgtccgcaaaggctccttttttctgcaagacttggataccctgccgaactttacgtcggaagggtatggttcaattcgtcgtgtgtatgtttacggcgaagaagaccagatctttagccgcgattttcagttatggcaaattaataattataagcctgataaagtgtactgtgtaccgagtgctgaccacaagattatgatcagccgcgtcaacgagctggcccagattctccaagaagttgcaaactctgcgagtgatcttcttgcagtggct

SEQ ID NO: 1248 - protein, 263 aa, synthetic construct
  REGION 1..263: note = Round 5 (Activity)
MVSAHFILIHSVCHGAWLWYKLIPLLQSAGHGVTAIDLWASGSNPRQLEQIGTWEQYSEPLFTLIESIPEGKKVILVGESGGGINIALAAEKYPEKVSALVFVNALMPDIDHSPAFVYKKYSEVFTDWKDSIFSNYTYGNDTVTAVELGDRTLAENIFSNSPIEDVELAKHRVRKGSFFLQDLDTLPNFTSEGYGSIRRVYVYGEEDQIFSRDFQLWQINNYKPDKVYCVPSADHKIMISRVNELAQILQEVANSASDLLAVA

SEQ ID NO: 1249 - DNA, 789 bp, synthetic construct
  misc_feature 1..789: note = Round 5 (Activity)
  source 1..789: mol_type = other DNA
atggttagtgcgcattttattctgatccacagtgtttgccatggcgcctggctgtggtataaactgatcccgttattacagtctgcaggtcataacgttacggcgattgatctttgggctagcgggagtaatcctcgccaactggaacagattggcacatgggagcagtactcagaaccattgttcaccctgatcgaatcgattccggaaggtaagaaagtcattctggtaggagaatccggtggcggcatcaatattgcactggccgcggagaaatatccggagaaagtgagcgccctcgtctttgtgaacgcacttatgcccgatatcgatcacagtccagcgttcgtggtcaagaaatatagcgaagttttcactgactggaaagattcgatcttcagcaattatacctacggtaacgacacggttaccgcggtggaattgggagatcgtactctggccgagaacatcttctccaattctccgattgaagatgtagaactggcgaaacatcgtgtccgcaaaggctccttttttctgcaagacttggataccctgccgaactttacgtcggaagggtatggttcaattcgtcgtgtgtatgtttacggcgaagaagaccagatctttagccgcgattttcagttatggcaaattaataattataagcctgataaagtgtactgtgtaccgagtgctgaccacaagattatgatcagccgcgtcaacgagctggcccagattctccaagaagttgcaaactctgcgagtgatcttcttgcagtggct

SEQ ID NO: 1250 - protein, 263 aa, synthetic construct
  REGION 1..263: note = Round 5 (Activity)
MVSAHFILIHSVCHGAWLWYKLIPLLQSAGHNVTAIDLWASGSNPRQLEQIGTWEQYSEPLFTLIESIPEGKKVILVGESGGGINIALAAEKYPEKVSALVFVNALMPDIDHSPAFVVKKYSEVFTDWKDSIFSNYTYGNDTVTAVELGDRTLAENIFSNSPIEDVELAKHRVRKGSFFLQDLDTLPNFTSEGYGSIRRVYVYGEEDQIFSRDFQLWQINNYKPDKVYCVPSADHKIMISRVNELAQILQEVANSASDLLAVA

SEQ ID NO: 1251 - DNA, 789 bp, synthetic construct
  misc_feature 1..789: note = Round 5 (Activity)
  source 1..789: mol_type = other DNA
atggttagtgcgcattttattctgatccacagtgtttgccatggcgcctggctgtggtataaactgatcccgttattacagtctgcaggtcataacgttacggcgattgatctttgggctagcgggagtaatcctcgccaactggaacagattggcacatgggagcagtactcagaaccattgttcaccctgatcgaatcgattccggaaggtaagaaagtcattctggtaggagaatccggtggcggcatcaatattgcactggccgcggagaaatatccggagaaagtgagcgccctcgtctttgtgaacgcacttatgcccgatatcgatcacagtccagcgttcgtggtcaagaaatatagcgaagttttcactgactggaaagattcgatcttcagcaattatacctacggtaacgacacggttgtagcggttgaattgggagatcgtactctggccgagaacatcttctccaattctccgattgaagatgtagaactggcgaaacatcgtgtccgcaaaggctccttttttctgcaagacttggataccctgccgaactttacgtcggaagggtatggttcaattcgtcgtgtgtatgtttacggcgaagaagaccagatctttagccgcgattttcatttatggcaaattaataattataagcctgataaagtgtactgtgtaccgagtgctgaccacaagattatgatcagccgcgtcaacgagctggcccagattctccaagaagttgcaaactctgcgagtgatcttcttgcagtggct

SEQ ID NO: 1252 - protein, 263 aa, synthetic construct
  REGION 1..263: note = Round 5 (Activity)
MVSAHFILIHSVCHGAWLWYKLIPLLQSAGHNVTAIDLWASGSNPRQLEQIGTWEQYSEPLFTLIESIPEGKKVILVGESGGGINIALAAEKYPEKVSALVFVNALMPDIDHSPAFVVKKYSEVFTDWKDSIFSNYTYGNDTVVAVELGDRTLAENIFSNSPIEDVELAKHRVRKGSFFLQDLDTLPNFTSEGYGSIRRVYVYGEEDQIFSRDFHLWQINNYKPDKVYCVPSADHKIMISRVNELAQILQEVANSASDLLAVA

SEQ ID NO: 1253 - DNA, 789 bp, synthetic construct
  misc_feature 1..789: note = Round 5 (Activity)
  source 1..789: mol_type = other DNA
atggttagtgcgcattttattctgatccacagtgtttgccatggcgcctggctgtggtataaactgatcccgttattacagtctgcaggtcataacgttacggcgattgatctttgggctagcgggagtaatcctcgccaactggaacagattggcacatgggagcagtactcagaaccattgttcaccctgatcgaatcgattccggaaggtaagaaagtcattctggtaggagaatccggtggcggcatcaatattgcactggccgcggagaaatatccggagaaagtgagcgccctcgtctttgtgaacgcacttatgcccgatatcgatcacagtccagcgttcgtgtataagaaatatagcgaagttttcactgactggaaagattcgatcttcagcaattatacctacggtaacgacacggttaccgcggtggaattgggagatcgtactctggccgagaacatcttctccaattctccgattgaagatgtagaactggcgaaacatcgtgtccgcaaaggctccttttttctgcaagacttggataccctgccgaactttacgtcggaagggtatggttcaattcgtcgtgtgtatgtttacggcgaagaagaccagatctttagccgcgattttcagttatggcaaattaataattataagcctgataaagtgtactgtgtaccgagtgctgaccacaagattatgatcagccgcgtcaacgagctggcccagattctccaagaagttgcaaactctgcgagtgatcttcttgcagtgggg

SEQ ID NO: 1254 - protein, 263 aa, synthetic construct
  REGION 1..263: note = Round 5 (Activity)
MVSAHFILIHSVCHGAWLWYKLIPLLQSAGHNVTAIDLWASGSNPRQLEQIGTWEQYSEPLFTLIESIPEGKKVILVGESGGGINIALAAEKYPEKVSALVFVNALMPDIDHSPAFVYKKYSEVFTDWKDSIFSNYTYGNDTVTAVELGDRTLAENIFSNSPIEDVELAKHRVRKGSFFLQDLDTLPNFTSEGYGSIRRVYVYGEEDQIFSRDFQLWQINNYKPDKVYCVPSADHKIMISRVNELAQILQEVANSASDLLAVG

SEQ ID NO: 1255 - DNA, 789 bp, synthetic construct
  misc_feature 1..789: note = Round 5 (Activity)
  source 1..789: mol_type = other DNA
atggttagtgcgcattttattctgatccacagtgtttgccatggcgcctggctgtggtataaactgatcccgttattacagtctgcaggtcataacgttacggcgattgatctttgggctagcgggagtaatcctcgccaactggaacagattggcacatgggagcagtactcagaaccattgttcaccctgatcgaatcgattccggaaggtaagaaagtcattctggtaggagaatccggtggcggcatcaatattgcactggccgcggagaaatatccggagaaagtgagcgccctcgtctttgtgaacgcacttatgcccgatatcgatcacagtccagcgttcgtgtataagaaatatagcgaagttttcactgactggaaagattcgatcttcagcaattatacctacggtaacgacacggttactgcgattgaattgggagatcgtactctgcgtgagaacatcttctccaattctccgattgaagatgtagaactggcgaaacatcgtgtccgcaaaggctccttttttctgcaagacttggataccctgccgaactttacgtcggaagggtatggttcaattcgtcgtgtgtatgtttacggcgaagaagaccagatctttagccgcgattttcagttatggcaaattaataattataagcctgataaagtgtactgtgtaccgagtgctgaccacaagattatgatcagccgcgtcaacgagctggcccagattctccaagaagttgcaaactctgcgagtgatcttcttgcagtggct

SEQ ID NO: 1256 - protein, 263 aa, synthetic construct
  REGION 1..263: note = Round 5 (Activity)
MVSAHFILIHSVCHGAWLWYKLIPLLQSAGHNVTAIDLWASGSNPRQLEQIGTWEQYSEPLFTLIESIPEGKKVILVGESGGGINIALAAEKYPEKVSALVFVNALMPDIDHSPAFVYKKYSEVFTDWKDSIFSNYTYGNDTVTAIELGDRTLRENIFSNSPIEDVELAKHRVRKGSFFLQDLDTLPNFTSEGYGSIRRVYVYGEEDQIFSRDFQLWQINNYKPDKVYCVPSADHKIMISRVNELAQILQEVANSASDLLAVA

SEQ ID NO: 1257 - DNA, 789 bp, synthetic construct
  misc_feature 1..789: note = Round 5 (Activity)
  source 1..789: mol_type = other DNA
atggttagtgcgcattttattctgatccacagtgtttgccatggcgcctggctgtggtataaactgatcccgttattacagtctgcaggtcataacgttacggcgattgatctttgggctagcgggagtaatcctcgccaactggaacagattggcacatgggagcagtactcagaaccattgttcaccctgatcgaatcgattccggaaggtaagaaagtcattctggtaggagaatccggtggcggcatcaatattgcactggccgcggagaaatatccggagaaagtgagcgccctcgtctttctgaacgcacttatgcccgatatcgatcacagtccagcgttcgtgtataagaaatatagcgaagttttcactgactggaaagattcgatcttcagcaattatacctacggtaacgacacggttactgcgattgaattgggagatcgtactctgcgtgagaacatcttctccaattctccgattgaagatgtagaactggcgaaacatctggtccgcaaaggctccttttttgtgcaagacttggataccctgccgaactttacgtcggaagggtatggttcaattcgtcgtgtgtatgtttacggcgaagaagaccagatctttagccgcgattttcagttatggcaaattaataattataagcctgataaagtgtactgtgtaccgggtgctgaccacaagattatgatcagccgcgtcaacgagctggcccagattctccaagaagttgcaaactctgcgagtgatcttcttgcagtggct

SEQ ID NO: 1258 - protein, 263 aa, synthetic construct
  REGION 1..263: note = Round 5 (Activity)
MVSAHFILIHSVCHGAWLWYKLIPLLQSAGHNVTAIDLWASGSNPRQLEQIGTWEQYSEPLFTLIESIPEGKKVILVGESGGGINIALAAEKYPEKVSALVFLNALMPDIDHSPAFVYKKYSEVFTDWKDSIFSNYTYGNDTVTAIELGDRTLRENIFSNSPIEDVELAKHLVRKGSFFVQDLDTLPNFTSEGYGSIRRVYVYGEEDQIFSRDFQLWQINNYKPDKVYCVPGADHKIMISRVNELAQILQEVANSASDLLAVA

SEQ ID NO: 1259 - DNA, 789 bp, synthetic construct
  misc_feature 1..789: note = Round 5 (Activity)
  source 1..789: mol_type = other DNA
atggttagtgcgcattttattctgatccacagtgtttgccatggcgcctggctgtggtataaactgatcccgttattacagtctgcaggtcataacgttacggcgattgatctttgggctagcgggagtaatcctcgccaactggaacagattggcacatgggagcagtactcagaaccattgttcaccctgatcgaatcgattccggaaggtaagaaagtcattctggtaggagaatccggtggcggcatcaatattgcactggccgcggagaaatatcaggagaaagtgagcgccctcgtctttctgaacgcacttatgcccgatatcgatcacagtccagcgttcgtggtcaagaaatatagcgaagttttcactgactggaaagattcgatcttcagcaattatacctacggtaacgacacggttactgcgattgaattgggagatcgtactctggccgagaacatcttctccaattctccgattgaagatgtagaactggcgaaacatcgtgtccgcaaaggctccttttttctgcaagacttggataccctgccgaactttacgtcggaagggtatggttcaattcgtcgtgtgtatgtttacggcgaagaagaccagatctttagccgcgattttcagttatggcaaattaataattataagcctgataaagtgtactgtgtaccgagtgctgaccacaagattatgatcagccgcgtcaacgagctggcccagattctccaagaagttgcaaactctgcgagtgatcttcttgcagtggct

SEQ ID NO: 1260 - protein, 263 aa, synthetic construct
  REGION 1..263: note = Round 5 (Activity)
MVSAHFILIHSVCHGAWLWYKLIPLLQSAGHNVTAIDLWASGSNPRQLEQIGTWEQYSEPLFTLIESIPEGKKVILVGESGGGINIALAAEKYQEKVSALVFLNALMPDIDHSPAFVVKKYSEVFTDWKDSIFSNYTYGNDTVTAIELGDRTLAENIFSNSPIEDVELAKHRVRKGSFFLQDLDTLPNFTSEGYGSIRRVYVYGEEDQIFSRDFQLWQINNYKPDKVYCVPSADHKIMISRVNELAQILQEVANSASDLLAVA

SEQ ID NO: 1261 - DNA, 789 bp, synthetic construct
  misc_feature 1..789: note = Round 5 (Activity)
  source 1..789: mol_type = other DNA
atggttagtgcgcattttattctgatccacagtgtttgccatggcgcctggctgtggtataaactgatcccgttattacagtctgcaggtcataacgttacggcgattgatctttgggctagcgggagtaatcctcgccaactggaacagattggcacatggtcgcagtactcagaaccattgttcaccctgatcgaatcgattccggaaggtaagaaagtcattctggtaggagaatccggtggcggcatcaatattgcactggccgcggagaaatatccggagaaagtgagcgccctcgtctttgtgaacgcacttatgcccgatatcgatcacagtccagcgttcgtgtataagaaatatagcgaagttttcactgactggaaagattcgatcttcagcaattatacctacggtaacgacacggttaccgcggtggaattgggagatcgtactctggccgagaacatcttctccaattctccgattgaagatgtagaactggcgaaacatcgtgtccgcaaaggctccttttttctgcaagacttggataccctgccgaactttacgtcggaagggtatggttcaattcgtcgtgtgtatgtttacggcgaagaagaccagatctttagccgcgattttcagttatggcaaattaataattataagcctgataaagtgtactgtgtaccgagtgctgaccacaagattatgatcagccgcgtcaacgagctggcccagattctccaagaagttgcaaactctgcgagtgatcttcttgcagtggct

SEQ ID NO: 1262 - protein, 263 aa, synthetic construct
  REGION 1..263: note = Round 5 (Activity)
MVSAHFILIHSVCHGAWLWYKLIPLLQSAGHNVTAIDLWASGSNPRQLEQIGTWSQYSEPLFTLIESIPEGKKVILVGESGGGINIALAAEKYPEKVSALVFVNALMPDIDHSPAFVYKKYSEVFTDWKDSIFSNYTYGNDTVTAVELGDRTLAENIFSNSPIEDVELAKHRVRKGSFFLQDLDTLPNFTSEGYGSIRRVYVYGEEDQIFSRDFQLWQINNYKPDKVYCVPSADHKIMISRVNELAQILQEVANSASDLLAVA

SEQ ID NO: 1263 - DNA, 789 bp, synthetic construct
  misc_feature 1..789: note = Round 5 (Activity)
  source 1..789: mol_type = other DNA
atggttagtgcgcattttgttctgatccacagtgtttgccatggcgcctggctgtggtataaactgatcccgttattacagtctgcaggtcataacgttacggcgattgatctttgggctagcgggagtaatcctcgccaactggaacagattggcacatgggagcagtactcagaaccattgttcaccctgatcgaatcgattccggaaggtaagaaagtcattctggtaggagaatccggtggcggcatcaatattgcactggccgcggagaaatatccggagaaagtgagcgccctcgtctttgtgaacgcacttatgcccgatatcgatcacagtccagcgttcgtgtataagaaatatagcgaagttttcactgactggaaagattcgatcttcagcaattatacctacggtaacgacacggttaccgcggtggaattgggagatcgtactctggccgagaacatctattccaattctccgattgaagatgtagaactggcgaaacatcgtgtccgcccaggctccttttttctgcaagacttggataccctgccgaactttacgtcggaagggtatggttcaattcgtcgtgtgtatgtttacggcgaagaagaccagatctttagccgcgattttcagttatggcaaattaataattataagcctgataaagtgtactgtgtaccgagtgctgaccacaagattatgatcagccgcgtcaacgagctggcccagattctccaagaagttgcaaactctgcgagtgatcttcttgcagtggct

SEQ ID NO: 1264 - protein, 263 aa, synthetic construct
  REGION 1..263: note = Round 5 (Activity)
MVSAHFVLIHSVCHGAWLWYKLIPLLQSAGHNVTAIDLWASGSNPRQLEQIGTWEQYSEPLFTLIESIPEGKKVILVGESGGGINIALAAEKYPEKVSALVFVNALMPDIDHSPAFVYKKYSEVFTDWKDSIFSNYTYGNDTVTAVELGDRTLAENIYSNSPIEDVELAKHRVRPGSFFLQDLDTLPNFTSEGYGSIRRVYVYGEEDQIFSRDFQLWQINNYKPDKVYCVPSADHKIMISRVNELAQILQEVANSASDLLAVA

SEQ ID NO: 1265 - DNA, 789 bp, synthetic construct
  misc_feature 1..789: note = Round 5 (Activity)
  source 1..789: mol_type = other DNA
atggttagtgcgcattttattctgatccacagtgtttgccatggcgcctggctgtggtataaactgatcccgttattacagtctgggggtcataacgttacggcgattgatctttgggctagcgggagtaatcctcgccaactggaacagattggcacatgggagcagtactcagaaccattgttcaccctgatcgaatcgattccggaaggtaagaaagtcattctggtaggagaatccggtggcggcatcaatattgcactggccgcggagaaatatccggagaaagtgagcgccctcgtctttgtgaacgcacttatgcccgatatcgatcacagtccagcgttcgtgtataagaaatatagcgaagttttcactgactggaaagattcgatcttcagcaattatacctacggtaacgacacggttaccgcggtggaattgggagatcgtactctggccgagaacatcttctccaattctccgattgaagatgtagaactggcgaaacatcgtgtccgcaaaggctccttttttctgcaagacttggataccctgccgaactttacgtcggaagggtatggttcaattcgtcgtgtgtatgtttacggcgaagaagaccagatctttagccgcgattttcagttatggcaaattaataattataagcctgataaagtgtactgtgtaccgagtgctgaccacaagattatgatcagccgcgtcaacgagctggcccagattctccaagaagttgcaaactctgcgagtgatcttcttgcagtggct

SEQ ID NO: 1266 - protein, 263 aa, synthetic construct
  REGION 1..263: note = Round 5 (Activity)
MVSAHFILIHSVCHGAWLWYKLIPLLQSGGHNVTAIDLWASGSNPRQLEQIGTWEQYSEPLFTLIESIPEGKKVILVGESGGGINIALAAEKYPEKVSALVFVNALMPDIDHSPAFVYKKYSEVFTDWKDSIFSNYTYGNDTVTAVELGDRTLAENIFSNSPIEDVELAKHRVRKGSFFLQDLDTLPNFTSEGYGSIRRVYVYGEEDQIFSRDFQLWQINNYKPDKVYCVPSADHKIMISRVNELAQILQEVANSASDLLAVA

SEQ ID NO: 1267 - DNA, 789 bp, synthetic construct
  misc_feature 1..789: note = Round 5 (Activity)
  source 1..789: mol_type = other DNA
atggttagtgcgcattttattctgatccacagtgtttgccatggcgcctggctgtggtataaactgatcccgttattacagtctgcaggtcataacgttacggcgattgatctttgggctagcgggagtaatcctcgccaactggaacagattggcacatgggagcagtactcagaaccattgttcaccctgatcgaatcgattccggaaggtaagaaagtcattctggtaggagaatccggtggcggcatcaatattgcactggccgcggagaaatatccggagaaagtgagcgccctcgtctttgtgaacgcacttatgcccgatatcgatcacagtccagcgttcgtgtataagaaatatagcgaagttttcactgactggaaagattcgatcttcagcaattatacctacggtaacgacacggttaccgcggtggaattgggagatcgtactctggccgagaacatctattccaattctccgattgaagatgtagaactggcgaaacatcgtgtccgcaaaggctccttttttctgcaagacttggataccctgccgaactttacgtcggaagggtatggttcaattcgtcgtgtgtatgtttacggcgaagaagaccagatctttagccgcgattttcagttatggcaaattaataattataagcctgataaagtgtactgtgtaccgagtgctgaccacaagattatgatcagccgcgtcaacgagctggcccagattctccaagaagttgcaaactctgcgagtgatcttcttgcagtggct

SEQ ID NO: 1268 - protein, 263 aa, synthetic construct
  REGION 1..263: note = Round 5 (Activity)
MVSAHFILIHSVCHGAWLWYKLIPLLQSAGHNVTAIDLWASGSNPRQLEQIGTWEQYSEPLFTLIESIPEGKKVILVGESGGGINIALAAEKYPEKVSALVFVNALMPDIDHSPAFVYKKYSEVFTDWKDSIFSNYTYGNDTVTAVELGDRTLAENIYSNSPIEDVELAKHRVRKGSFFLQDLDTLPNFTSEGYGSIRRVYVYGEEDQIFSRDFQLWQINNYKPDKVYCVPSADHKIMISRVNELAQILQEVANSASDLLAVA

SEQ ID NO: 1269 - DNA, 789 bp, synthetic construct
  misc_feature 1..789: note = Round 5 (Activity)
  source 1..789: mol_type = other DNA
atggttagtgcgcattttattctgatccacagtgtttgccatggcgcctggctgtggtataaactgatcccgttattacagtctgcaggtcataacgttacggcgattgatctttgggctagcgggagtaatcctcgccaactggaacagattggcacatgggagcagtactcagaaccattgttcaccctgatcgaatcgattccggaaggtaagaaagtcattctggtaggagaatccggtggcggcatcaatattgcactggccgcggagaaatatccggagaaagtgagcgccctcgtctttgtgaacgcacttatgcccgatatcgatcacagtccagcgttcgtgtataagaaatatagcgaagttttcactgactggaaagattcgatcttcagcaattatatgtacggtaacgacacggttaccgcggtggaattgggagatcgtactctggccgagaacatcttctccaattctccgattgaagatgtagaactggcgaaacatcgtgtccgcaaaggctccttttttctgcaagacttggataccctgccgaactttacgtcggaagggtatggttcaattcgtcgtgtgtatgtttacggcgaagaagaccagatctttagccgcgattttcagttatggcaaattaataattataagcctgataaagtgtactgtgtaccgagtgctgaccacaagattatgatcagccgcgtcaacgagctggcccagattctccaagaagttgcaaactctgcgagtgatcttcttgcagtggct

SEQ ID NO: 1270 - protein, 263 aa, synthetic construct
  REGION 1..263: note = Round 5 (Activity)
MVSAHFILIHSVCHGAWLWYKLIPLLQSAGHNVTAIDLWASGSNPRQLEQIGTWEQYSEPLFTLIESIPEGKKVILVGESGGGINIALAAEKYPEKVSALVFVNALMPDIDHSPAFVYKKYSEVFTDWKDSIFSNYMYGNDTVTAVELGDRTLAENIFSNSPIEDVELAKHRVRKGSFFLQDLDTLPNFTSEGYGSIRRVYVYGEEDQIFSRDFQLWQINNYKPDKVYCVPSADHKIMISRVNELAQILQEVANSASDLLAVA

SEQ ID NO: 1271 - DNA, 789 bp, synthetic construct
  misc_feature 1..789: note = Round 5 (Activity)
  source 1..789: mol_type = other DNA
atggttagtgcgcattttattctgatccacagtgtttgccatggcgcctggctgtggtataaactgatcccgttattacagtctgcaggtcataacgttacggcgattgatctttgggctagcgggagtaatcctgttcaactggaacagattggcacatgggagcagtactcagaaccattgttcaccctgatcgaatcgattccggaaggtaagaaagtcattctggtaggagaatccggtggcggcatcaatattgcactggccgcggagaaatatccggagaaagtgagcgccctcgtctttgtgaacgcacttatgcccgatatcgatcacagtccagcgttcgtgtataagaaatatagcgaagttttcactgactggaaagattcgatcttcagcaattatacctacggtaacgacacggttaccgcggtggaattgggagatcgtactctggccgagaacatcttctccaattctccgattgaagatgtagaactggcgaaacatcgtgtccgcaaaggctccttttttctgcaagacttggataccctgccgaactttacgtcggaagggtatggttcaattcgtcgtgtgtatgtttacggcgaagaagaccagatctttagccgcgattttcagttatggcaaattaataattataagcctgataaagtgtactgtgtaccgagtgctgaccacaagattatgatcagccgcgtcaacgagctggcccagattctccaagaagttgcaaactctgcgagtgatcttcttgcagtggct

SEQ ID NO: 1272 - protein, 263 aa, synthetic construct
  REGION 1..263: note = Round 5 (Activity)
MVSAHFILIHSVCHGAWLWYKLIPLLQSAGHNVTAIDLWASGSNPVQLEQIGTWEQYSEPLFTLIESIPEGKKVILVGESGGGINIALAAEKYPEKVSALVFVNALMPDIDHSPAFVYKKYSEVFTDWKDSIFSNYTYGNDTVTAVELGDRTLAENIFSNSPIEDVELAKHRVRKGSFFLQDLDTLPNFTSEGYGSIRRVYVYGEEDQIFSRDFQLWQINNYKPDKVYCVPSADHKIMISRVNELAQILQEVANSASDLLAVA

SEQ ID NO: 1273 - DNA, 789 bp, synthetic construct
  misc_feature 1..789: note = Round 5 (Activity)
  source 1..789: mol_type = other DNA
atggttagtgcgcattttattctgatccacagtgtttgccatggcgcctggctgtggtataaactgatcccgttattacaatctgcaggtcataacgttacggcgattgatctttgggctagcgggagcaatcctcgccaactggaacagattggcacatgggagcagtactcagaaccattgttcaccctgatcgaatcgattccggaaggtaagaaagtcattctggtaggagaatccggtggcggcatcaatattgcactggccgcggagaaatatccggagaaagtgagcgccctcgtctttgtgaacgcacttatgcccgatatcgatcacagtccagcgttcgtgtataagaaatatagcgaagttttcactgactggaaagattcgatcttcagcaattatacctacggtaacgacacggttaccgcggtggaattgggagatcgtactctggccgagaacatcttctccaattctccgattgaagatgtagaactggcgaaacatctggtccgcaaaggctccttttttctgcaagacttggataccctgccgaactttagttcggaagggtatggttcaattcgtcgtgtgtatgtttacggcgaagaagaccagatctttagccgcgattttcagttatggcaaattaataattataagcctgataaagtgtactgtgtaccgagtgctgaccacaagattatgatcagccgcgtcaacgagctggcccagattctccaagaagttgcaaactctgcgagtgatcttcttgcagtggct

SEQ ID NO: 1274 - protein, 263 aa, synthetic construct
  REGION 1..263: note = Round 5 (Activity)
MVSAHFILIHSVCHGAWLWYKLIPLLQSAGHNVTAIDLWASGSNPRQLEQIGTWEQYSEPLFTLIESIPEGKKVILVGESGGGINIALAAEKYPEKVSALVFVNALMPDIDHSPAFVYKKYSEVFTDWKDSIFSNYTYGNDTVTAVELGDRTLAENIFSNSPIEDVELAKHLVRKGSFFLQDLDTLPNFSSEGYGSIRRVYVYGEEDQIFSRDFQLWQINNYKPDKVYCVPSADHKIMISRVNELAQILQEVANSASDLLAVA

SEQ ID NO: 1275 - DNA, 789 bp, synthetic construct
  misc_feature 1..789: note = Round 5 (Activity)
  source 1..789: mol_type = other DNA
atggttagtgcgcattttattctgatccacagtgtttgccatggcgcctggctgtggtataaactgatcccgttattacagtctgcaggtcataacgttacggcgattgatctttgggctagcgggagtaatcctcgccaactggaacagattggcacatgggagcagtactcagaaccattgttcaccctgatcgaatcgattccggaaagtaagaaagtcattctggtaggagaatccggtggcggcatcaatattgcactggccgcggagaaatatccggagaaagtgagcgccctcgtctttgtgaacgcacttatgcccgatatcgatcacagtccagcgttcgtgtataagaaatatagcgaagttttcactgactggaaagattcgatcttcagcaattatacctacggtaacgacacggttaccgcggtggaattgggagatcgtactctggccgagaacatcttctccaattctccgattgaagatgtagaactggcgaaacatcgtgtccgcaaaggctccttttttctgcaagacttggataccctgccgaactttacgtcggaagggtatggttcaattcgtcgtgtgtatgtttacggcgaagaagaccagatctttagccgcgattttcagttatggcaaattaataattataagcctgataaagtgtactgtgtaccgagtgctgaccacaagattatgatcagccgcgtcaacgagctggcccagattctccaagaagttgcaaactctgcgagtgatcttcttgcagtggct

SEQ ID NO: 1276 - protein, 263 aa, synthetic construct
  REGION 1..263: note = Round 5 (Activity)
MVSAHFILIHSVCHGAWLWYKLIPLLQSAGHNVTAIDLWASGSNPRQLEQIGTWEQYSEPLFTLIESIPESKKVILVGESGGGINIALAAEKYPEKVSALVFVNALMPDIDHSPAFVYKKYSEVFTDWKDSIFSNYTYGNDTVTAVELGDRTLAENIFSNSPIEDVELAKHRVRKGSFFLQDLDTLPNFTSEGYGSIRRVYVYGEEDQIFSRDFQLWQINNYKPDKVYCVPSADHKIMISRVNELAQILQEVANSASDLLAVA

SEQ ID NO: 1277 - DNA, 789 bp, synthetic construct
  misc_feature 1..789: note = Round 5 (Activity)
  source 1..789: mol_type = other DNA
atggttagtgcgcattttattctgatccacagtgtttgccatggcgcctggctgtggtataaactgatcccgttattacagtctgcaggtcataacgttacggcgattgatctttgggctagcgggagtaatcctcgccaactggaacagattggcacatgggagcagtactcagaaccattgttcaccctgatcgaatcgattccggaaggtaagaaagtcattctggtaggagaatccggtggcggcatcaatattgcactggccgcggagaaatatccggagaaagtgagcgccctcgtctttgtgaacgcacttatgcccgatatcgatcacagtccagcgttcgtgtataagaaatatagcgaagttttcactgactggaaagattcgatcttcagcaattatacctacggtaacgacacggttaccgcggtggaattgggagatcgtactctggccgagaacatcttctccaattctccgattgaagatgtagaactggcgaaacatcgtgtccgcaaaggctccttttttctgcaagacttggataccctgccgaactttacgtcggaagggtatggttcaattcgtcgtgtgtatgtttacggcgaagaagaccagatctttagccgcgattttcagttatggcaaattaataattataagcctgataaagtgtactgtgtaccgagtgctgaccacaagattatgatcagccgcgtcaacgagctggcccagattctccaagaagttgcaaactctgcgagtgatcttcttggtgtggct

SEQ ID NO: 1278 - protein, 263 aa, synthetic construct
  REGION 1..263: note = Round 5 (Activity)
MVSAHFILIHSVCHGAWLWYKLIPLLQSAGHNVTAIDLWASGSNPRQLEQIGTWEQYSEPLFTLIESIPEGKKVILVGESGGGINIALAAEKYPEKVSALVFVNALMPDIDHSPAFVYKKYSEVFTDWKDSIFSNYTYGNDTVTAVELGDRTLAENIFSNSPIEDVELAKHRVRKGSFFLQDLDTLPNFTSEGYGSIRRVYVYGEEDQIFSRDFQLWQINNYKPDKVYCVPSADHKIMISRVNELAQILQEVANSASDLLGVA

SEQ ID NO: 1279 - DNA, 789 bp, synthetic construct
  misc_feature 1..789: note = Round 5 (Activity)
  source 1..789: mol_type = other DNA
atggttagtgcgcattttattctgatccacagtgtttgccatggcgcctggctgtggtataaactgatcccgttattacagtctgcaggtcataacgttacggcgattgatctttgggctagcgggagtaatcctcgccaactggaacagattggcacatgggagcagtactcagaaccattgttcaccctgatcgaatcgattccggaaggtaagaaagtcattctggtaggagaatccggtggcggcatcaatattgcactggccgcggagaaatatccggagaaagtgagcgccctcgtctttgtgaacgcacttatgcccgatatcgatcacagtccagcgttcgtgtataagaaatatagcgaagttttcactgactggaaagattcgatcttcagcaattatacctacggtaacgacacggttaccgcggtggaattgggagatcgtactctggccgagaacatcttctccaattctccgattgaagatgtagaactggcgaaacatcgtgtccgcaaaggctccttttttctgcaagacttggataccctgccgaactttacgtcggaagggtatggttcaattcgtcgtgtgtatgtttacggcgaagaagaccagatctttagccgcgattttcagttatggcaaattaataattataagcctgataaagtgtactgtgtaccgagtgctgaccacaagattatgatcagccgcgtcaacgagctggcccagattctccaagaagttgcaaactctgcgagtgatcttcttgcagtgagt

SEQ ID NO: 1280 - protein, 263 aa, synthetic construct
  REGION 1..263: note = Round 5 (Activity)
MVSAHFILIHSVCHGAWLWYKLIPLLQSAGHNVTAIDLWASGSNPRQLEQIGTWEQYSEPLFTLIESIPEGKKVILVGESGGGINIALAAEKYPEKVSALVFVNALMPDIDHSPAFVYKKYSEVFTDWKDSIFSNYTYGNDTVTAVELGDRTLAENIFSNSPIEDVELAKHRVRKGSFFLQDLDTLPNFTSEGYGSIRRVYVYGEEDQIFSRDFQLWQINNYKPDKVYCVPSADHKIMISRVNELAQILQEVANSASDLLAVS

SEQ ID NO: 1281 - DNA, 789 bp, synthetic construct
  misc_feature 1..789: note = Round 5 (Activity)
  source 1..789: mol_type = other DNA
atggttagtgcgcattttattctgatccacagtgtttgccatggcgcctggctgtggtataaactgatcccgttattagaatctgcaggtcataacgttacggcgattgatctttgggctagcgggatcaatcctcgccaactggaacagattggcacatgggagcagtactcagaaccattgttcaccctgatcgaatcgattccggaaggtaagaaagtcattctggtaggagaatccggtggcggcatcaatattgcactggccgcggagaaatatccggagaaagtgagcgccctcgtctttgtgaacgcacttatgcccgatatcgatcacagtccatcgttcgtgtataagaaatatagcgaagttttcactgactggaaagattcgatcttcagcaattatacctacggtaacgacacggttaccgcggtggaattgggagatcgtactctggccgagaacatcttctccaattctccgattgaagatgtagaactggcgaaacatctggtccgcaaaggctccttttttctgcaagacttggataccctgccgaactttacgtcggaagggtatggttcaattcgtcgtgtgtatgtttacggcgaagaagaccagatctttagccgcgattttcagttatggcaaattaataattataagcctgataaggtgtactgtgtaccgagtgctgaccacaagattatgatcagccgcgtcaacgagctggcccagattctccaagaagttgcaaactctgcgagtgatcttcttgcagtggct

SEQ ID NO: 1282 - protein, 263 aa, synthetic construct
  REGION 1..263: note = Round 5 (Activity)
MVSAHFILIHSVCHGAWLWYKLIPLLESAGHNVTAIDLWASGINPRQLEQIGTWEQYSEPLFTLIESIPEGKKVILVGESGGGINIALAAEKYPEKVSALVFVNALMPDIDHSPSFVYKKYSEVFTDWKDSIFSNYTYGNDTVTAVELGDRTLAENIFSNSPIEDVELAKHLVRKGSFFLQDLDTLPNFTSEGYGSIRRVYVYGEEDQIFSRDFQLWQINNYKPDKVYCVPSADHKIMISRVNELAQILQEVANSASDLLAVA

SEQ ID NO: 1283 - DNA, 789 bp, synthetic construct
  misc_feature 1..789: note = Round 5 (Activity)
  source 1..789: mol_type = other DNA
atggttagtgcgcattttattctgatccacagtgtttgccatggcgcctggctgtggtataaactgatcccgttattacagtctgcaggtcataacgttacggcgattgatctttgggctagcgggagtaatcctcgccaactggaacagattggcacatgggagcagtactcagaaccattgttcaccctgatcgaatcgattccggaaggtaagaaagtcattctggtaggagaatccggtggcggcatcaatattgcactggccgcggagaaatatccggagaaagtgagcgccctcgtctttgtgaacgcacttatgcccgatatcgatcacagtccagcgttcgtgtataagaaatatagcgaagttttcactgactggaaagattcgatcttcagcaattatacctacggtaacgacacggttaccgcggtggaattgggagatcgtactctggccgagaacatcttctccaattctccgattgaagatgtagaactggcgaaacatcgtgtccgcaaaggctccttttttctgcaagacttggataccctgccgaactttacgtcggaagggtatggttcaattcgtcgtgtgtatgtttacggcgaagaagaccagatctttagccgcgattttcagttatggcaaattaataattatatgcctgataaagtgtactgtgtaccgagtgctgaccacaagattatgatcagccgcgtcaacgagctggcccagattctccaagaagttgcaaactctgcgagtgatcttcttgcagtggct

SEQ ID NO: 1284 - protein, 263 aa, synthetic construct
  REGION 1..263: note = Round 5 (Activity)
MVSAHFILIHSVCHGAWLWYKLIPLLQSAGHNVTAIDLWASGSNPRQLEQIGTWEQYSEPLFTLIESIPEGKKVILVGESGGGINIALAAEKYPEKVSALVFVNALMPDIDHSPAFVYKKYSEVFTDWKDSIFSNYTYGNDTVTAVELGDRTLAENIFSNSPIEDVELAKHRVRKGSFFLQDLDTLPNFTSEGYGSIRRVYVYGEEDQIFSRDFQLWQINNYMPDKVYCVPSADHKIMISRVNELAQILQEVANSASDLLAVA

SEQ ID NO: 1285 - DNA, 789 bp, synthetic construct
  misc_feature 1..789: note = Round 5 (Activity)
  source 1..789: mol_type = other DNA
atggttagtgcgcattttattctgatccacagtgtttgccatggcgcctggctgtggtataaactgatcccgttattacagtctgcaggtcataacgttacggcgattgatctttgggctagcgggagtaatcctcgccaactggaacagattggcacatgggagcagtactcagaaccattgttcaccctgatcgaatcgattccggaaggtgggaaagtcattctggtaggagaatccggtggcggcatcaatattgcactggccgcggagaaatatccggagaaagtgagcgccctcgtctttgtgaacgcacttatgcccgatatcgatcacagtccagcgttcgtgtataagaaatatagcgaagttttcactgactggaaagattcgatcttcagcaattatacctacggtaacgacacggttaccgcggtggaattgggagatcgtactctggccgagaacatcttctccaattctccgattgaagatgtagaactggcgaaacatcgtgtccgcaaaggctccttttttctgcaagacttggataccctgccgaactttacgtcggaagggtatggttcaattcgtcgtgtgtatgtttacggcgaagaagaccagatctttagccgcgattttcagttatggcaaattaataattataagcctgataaagtgtactgtgtaccgagtgctgaccacaagattatgatcagccgcgtcaacgagctggcccagattctccaagaagttgcaaactctgcgagtgatcttcttgcagtggct

SEQ ID NO: 1286 - protein, 263 aa, synthetic construct
  REGION 1..263: note = Round 5 (Activity)
MVSAHFILIHSVCHGAWLWYKLIPLLQSAGHNVTAIDLWASGSNPRQLEQIGTWEQYSEPLFTLIESIPEGGKVILVGESGGGINIALAAEKYPEKVSALVFVNALMPDIDHSPAFVYKKYSEVFTDWKDSIFSNYTYGNDTVTAVELGDRTLAENIFSNSPIEDVELAKHRVRKGSFFLQDLDTLPNFTSEGYGSIRRVYVYGEEDQIFSRDFQLWQINNYKPDKVYCVPSADHKIMISRVNELAQILQEVANSASDLLAVA

SEQ ID NO: 1287 - DNA, 789 bp, synthetic construct
  misc_feature 1..789: note = Round 5 (Activity)
  source 1..789: mol_type = other DNA
atggttagtgcgcattttattctgatccacagtgtttgccatggcgcctggctgtggtataaactgatcccgttattacagtctgcaggtcataacgttacggcgattgatctttgggctagcgggagtaatcctcgccaactggaacagattggcacatgggagcagtactcagaaccattgttcaccctgatcgaatcgattccggaaggtaagaaagtcattctggtaggagaatccggtggcggcatcaatattgcactggccgcggagaaatatccggagaaagtgagcgccctcgtctttgtgaacgcacttatgcccgatatcgatcacagtccagcgttcgtgtataagaaatatagcgaagttttcactgactggaaagattcgatcttcagcaattatacctacggtaacgacacggttaccgcggtggaattgggagatcgtactctggccgagaacatcttctccaattctccgattgaagatgtagaactggcgaaacatcgtgtccgcaaaggctccttttttctgcaagacttggataccctgccgaactttacgtcggaagggtatggttcaattcgtcgtgtgtatgtttacggcgaagaagaccagatctttagccgcgattttcagttatggcaaattaataattataagcctgataaagtgtactgggtaccgagtgctgaccacaagattatgatcagccgcgtcaacgagctggcccagattctccaagaagttgcaaactctgcgagtgatcttcttgcagtggct

SEQ ID NO: 1288 - protein, 263 aa, synthetic construct
  REGION 1..263: note = Round 5 (Activity)
MVSAHFILIHSVCHGAWLWYKLIPLLQSAGHNVTAIDLWASGSNPRQLEQIGTWEQYSEPLFTLIESIPEGKKVILVGESGGGINIALAAEKYPEKVSALVFVNALMPDIDHSPAFVYKKYSEVFTDWKDSIFSNYTYGNDTVTAVELGDRTLAENIFSNSPIEDVELAKHRVRKGSFFLQDLDTLPNFTSEGYGSIRRVYVYGEEDQIFSRDFQLWQINNYKPDKVYWVPSADHKIMISRVNELAQILQEVANSASDLLAVA

SEQ ID NO: 1289 - DNA, 789 bp, synthetic construct
  misc_feature 1..789: note = Round 5 (Activity)
  source 1..789: mol_type = other DNA
atggttagtgcgcattttattctgatccacagtgtttgccatggcgcctggctgtggtataaactgatcccgttattacaatctgcaggtcataacgttacggcgattgatctttgggctagcgggatcaatcctcgccaactggaacagattggcacatgggagcagtactcagaaccattgttcaccctgatcgaatcgattccggaaggtaagaaagtcattctggtaggagaatccggtggcggcatcaatattgcactggccgcggagaaatatccggagaaagtgagcgcgctggtctttgtgaacgcacttatgcccgataccgatcacagtccatcgttcgtgtataagaaatatagcgaagttttcactgactggaaagattcgatcttcagcaattatacctacggtaacgacacggttaccgcggtggaattgggagatcgtactctggccgagaacatcttctccaattctccgattgaagatgtagaactggcgaaacatctggtccgcaaaggctccttttttctgcaagacttggataccctgccgaactttacgtcggaagggtatggttcaattcgtcgtgtgtatgtttacggcgaagaagaccagatctttagccgcgattttcagttatggcaaattaataattataagcctgataaagtgtactgtgtaccgagtgctgaccacaagattatgatcagccgcgtcaacgagctggcccagattctccaagaagtcgcaaactctgcgagtgatcttcttgcagtggct

SEQ ID NO: 1290 - protein, 263 aa, synthetic construct
  REGION 1..263: note = Round 5 (Activity)
MVSAHFILIHSVCHGAWLWYKLIPLLQSAGHNVTAIDLWASGINPRQLEQIGTWEQYSEPLFTLIESIPEGKKVILVGESGGGINIALAAEKYPEKVSALVFVNALMPDTDHSPSFVYKKYSEVFTDWKDSIFSNYTYGNDTVTAVELGDRTLAENIFSNSPIEDVELAKHLVRKGSFFLQDLDTLPNFTSEGYGSIRRVYVYGEEDQIFSRDFQLWQINNYKPDKVYCVPSADHKIMISRVNELAQILQEVANSASDLLAVA

SEQ ID NO: 1291 - DNA, 789 bp, synthetic construct
  misc_feature 1..789: note = Round 5 (Activity)
  source 1..789: mol_type = other DNA
atggttagtgcgcattttattctgatccacagtgtttgccatggcgcctggctgtggtataaactgatcccgttattacagtctgcaggtcataacgttacggcgattgatctttgggctagcgggagtaatcctcgccaactggaacagattggcacatgggagcagtactcagaaccattgttcaccctgatcgaatcgattccggaaggtaagcgggtcattctggtaggagaatccggtggcggcatcaatattgcactggccgcggagaaatatccggagaaagtgagcgccctcgtctttgtgaacgcacttatgcccgatatcgatcacagtccagcgttcgtgtataagaaatatagcgaagttttcactgactggaaagattcgatcttcagcaattatacctacggtaacgacacggttaccgcggtggaattgggagatcgtactctggccgagaacatcttctccaattctccgattgaagatgtagaactggcgaaacatcgtgtccgcaaaggctccttttttctgcaagacttggataccctgccgaactttacgtcggaagggtatggttcaattcgtcgtgtgtatgtttacggcgaagaagaccagatctttagccgcgattttcagttatggcaaattaataattataagcctgataaagtgtactgtgtaccgagtgctgaccacaagattatgatcagccgcgtcaacgagctggcccagattctccaagaagttgcaaactctgcgagtgatcttcttgcagtggct

SEQ ID NO: 1292 - protein, 263 aa, synthetic construct
  REGION 1..263: note = Round 5 (Activity)
MVSAHFILIHSVCHGAWLWYKLIPLLQSAGHNVTAIDLWASGSNPRQLEQIGTWEQYSEPLFTLIESIPEGKRVILVGESGGGINIALAAEKYPEKVSALVFVNALMPDIDHSPAFVYKKYSEVFTDWKDSIFSNYTYGNDTVTAVELGDRTLAENIFSNSPIEDVELAKHRVRKGSFFLQDLDTLPNFTSEGYGSIRRVYVYGEEDQIFSRDFQLWQINNYKPDKVYCVPSADHKIMISRVNELAQILQEVANSASDLLAVA

SEQ ID NO: 1293 - DNA, 789 bp, synthetic construct
  misc_feature 1..789: note = Round 5 (Activity)
  source 1..789: mol_type = other DNA
atggttagtgcgcattttattctgatccacagtgtttgccatggcgcctggctgtggtataaactgatcccgttattacagtctgcaggtcataacgttacggcgattgatctttgggctagcgggagtaatcctcatcaactggaacagattggcacatgggagcagtactcagaaccattgttcaccctgatcgaatcgattccggaaggtaagaaagtcattctggtaggagaatccggtggcggcatcaatattgcactggccgcggagaaatatccggagaaagtgagcgccctcgtctttgtgaacgcacttatgcccgatatcgatcacagtccagcgttcgtgtataagaaatatagcgaagttttcactgactggaaagattcgatcttcagcaattatacctacggtaacgacacggttaccgcggtggaattgggagatcgtactctggccgagaacatcttctccaattctccgattgaagatgtagaactggcgaaacatcgtgtccgcaaaggctccttttttctgcaagacttggataccctgccgaactttacgtcggaagggtatggttcaattcgtcgtgtgtatgtttacggcgaagaagaccagatctttagccgcgattttcagttatggcaaattaataattataagcctgataaagtgtactgtgtaccgagtgctgaccacaagattatgatcagccgcgtcaacgagctggcccagattctccaagaagttgcaaactctgcgagtgatcttcttgcagtggct

SEQ ID NO: 1294 - protein, 263 aa, synthetic construct
  REGION 1..263: note = Round 5 (Activity)
MVSAHFILIHSVCHGAWLWYKLIPLLQSAGHNVTAIDLWASGSNPHQLEQIGTWEQYSEPLFTLIESIPEGKKVILVGESGGGINIALAAEKYPEKVSALVFVNALMPDIDHSPAFVYKKYSEVFTDWKDSIFSNYTYGNDTVTAVELGDRTLAENIFSNSPIEDVELAKHRVRKGSFFLQDLDTLPNFTSEGYGSIRRVYVYGEEDQIFSRDFQLWQINNYKPDKVYCVPSADHKIMISRVNELAQILQEVANSASDLLAVA

SEQ ID NO: 1295 - DNA, 789 bp, synthetic construct
  misc_feature 1..789: note = Round 5 (Activity)
  source 1..789: mol_type = other DNA
atggttagtgcgcattttattctgatccacagtgtttgccatggcgcctggctgtggtataaactgatcccgttattacagtctgcaggtcataacgttacggcgattgatctttgggctagcgggagtaatcctcgccaactggaacagattggcacatgggagcagtactcagaaccattgttcaccctgatcgaatcgattccggaaggtaagaaagtcattctggtaggagaatccggtggcggcatcaatattgcactggccgcggagaaatatccggagaaagtgagcgccctcgtctttgtgaacgcacttatgcccgatatcgatcacagtccagcgttcgtgtataagaaatatagcgaagttttcactgactggaaagattcgatcttcagcaattatacctacggtaacgacacggttaccgcggtggaattgggagatcgtactctggccgagaacatcttctccaattctccgattgaagatgtagaactggcgaaacatcgtgtccgcaaaggctccttttttctgcaagacttggataccctgccgaactttacgtcggaagggtatggttcaattcgtcgtgtgtatgtttacggcgaagaagaccagatctttagccgcgattttcagttatggcaaattaataattattctcctgataaagtgtactgtgtaccgagtgctgaccacaagattatgatcagccgcgtcaacgagctggcccagattctccaagaagttgcaaactctgcgagtgatcttcttgcagtggct

SEQ ID NO: 1296 - protein, 263 aa, synthetic construct
  REGION 1..263: note = Round 5 (Activity)
MVSAHFILIHSVCHGAWLWYKLIPLLQSAGHNVTAIDLWASGSNPRQLEQIGTWEQYSEPLFTLIESIPEGKKVILVGESGGGINIALAAEKYPEKVSALVFVNALMPDIDHSPAFVYKKYSEVFTDWKDSIFSNYTYGNDTVTAVELGDRTLAENIFSNSPIEDVELAKHRVRKGSFFLQDLDTLPNFTSEGYGSIRRVYVYGEEDQIFSRDFQLWQINNYSPDKVYCVPSADHKIMISRVNELAQILQEVANSASDLLAVA

SEQ ID NO: 1297 - DNA, 789 bp, synthetic construct
  misc_feature 1..789: note = Round 5 (Activity)
  source 1..789: mol_type = other DNA
atggttagtgcgcattttattctgatccacagtgtttgccatggcgcctggctgtggtataaactgatcccgttattacagtctgcaggtcataacgttacggcgattgatctttgggctagcgggagtaatcctcgccaactggaacagattggcacatgggagcagtactcagaaccattgttcaccctgatcgaatcgattccggaaggtaagaaagtcattctggtaggagaatccggtggcggcatcaatattgcactggccgcggagaaatatccggagaaagtgagcgccctcgtctttgtgaacgcacttatgcccgatatcgatcacagtccagcgttcgtgtataagaaatatagcgaagttttcactgactggaaagattcgatcttcagcaattatacctacggtaacgacacggttaccgcggtggaattgggagatcgtactctggccgagaacatcttctccaattctccgattgaagatgtagaactggcgaaacatcgtgtccgcaaaggctccttttttctgcaagacttggataccctgccgaactttacgtcggaagggtatggttcaattcttcgtgtgtatgtttacggcgaagaagaccagatctttagccgcgattttcagttatggcaaattaataattataagcctgataaagtgtactgtgtaccgagtgctgaccacaagattatgatcagccgcgtcaacgagctggcccagattctccaagaagttgcaaactctgcgagtgatcttcttgcagtggct

SEQ ID NO: 1298 - protein, 263 aa, synthetic construct
  REGION 1..263: note = Round 5 (Activity)
MVSAHFILIHSVCHGAWLWYKLIPLLQSAGHNVTAIDLWASGSNPRQLEQIGTWEQYSEPLFTLIESIPEGKKVILVGESGGGINIALAAEKYPEKVSALVFVNALMPDIDHSPAFVYKKYSEVFTDWKDSIFSNYTYGNDTVTAVELGDRTLAENIFSNSPIEDVELAKHRVRKGSFFLQDLDTLPNFTSEGYGSILRVYVYGEEDQIFSRDFQLWQINNYKPDKVYCVPSADHKIMISRVNELAQILQEVANSASDLLAVA

SEQ ID NO: 1299 - DNA, 789 bp, synthetic construct
  misc_feature 1..789: note = Round 5 (Activity)
  source 1..789: mol_type = other DNA
atggttagtgcgcattttattctgatccacagtgtttgccatggcgcctggctgtggtataaactgatcccgttattacagtctgcaggtcataacgttacggcgattgatctttgggctagcgggagtaatcctcgccaactggaacagattggcacatgggggcagtactcagaaccattgttcaccctgatcgaatcgattccggaaggtaagaaagtcattctggtaggagaatccggtggcggcatcaatattgcactggccgcggagaaatatccggagaaagtgagcgccctcgtctttgtgaacgcacttatgcccgatatcgatcacagtccagcgttcgtgtataagaaatatagcgaagttttcactgactggaaagattcgatcttcagcaattatacctacggtaacgacacggttaccgcggtggaattgggagatcgtactctggccgagaacatcttctccaattctccgattgaagatgtagaactggcgaaacatcgtgtccgcaaaggctccttttttctgcaagacttggataccctgccgaactttacgtcggaagggtatggttcaattcgtcgtgtgtatgtttacggcgaagaagaccagatctttagccgcgattttcagttatggcaaattaataattataagcctgataaagtgtactgtgtaccgagtgctgaccacaagattatgatcagccgcgtcaacgagctggcccagattctccaagaagttgcaaactctgcgagtgatcttcttgcagtggct

SEQ ID NO: 1300 - protein, 263 aa, synthetic construct
  REGION 1..263: note = Round 5 (Activity)
MVSAHFILIHSVCHGAWLWYKLIPLLQSAGHNVTAIDLWASGSNPRQLEQIGTWGQYSEPLFTLIESIPEGKKVILVGESGGGINIALAAEKYPEKVSALVFVNALMPDIDHSPAFVYKKYSEVFTDWKDSIFSNYTYGNDTVTAVELGDRTLAENIFSNSPIEDVELAKHRVRKGSFFLQDLDTLPNFTSEGYGSIRRVYVYGEEDQIFSRDFQLWQINNYKPDKVYCVPSADHKIMISRVNELAQILQEVANSASDLLAVA

SEQ ID NO: 1301 - DNA, 789 bp, synthetic construct
  misc_feature 1..789: note = Round 5 (Activity)
  source 1..789: mol_type = other DNA
atggttagtgcgcattttattctgatccacagtgtttgccatggcgcctggctgtggtataaactgatcccgttattacagtctgcaggtcataacgttacggcgattgatctttgggctagcgggagtaatcctcgccaactggaacagattggcacatgggagcagtactcagaaccattgttcaccctgatcgaatcgattccggaaggtaagaaagtcattctggtaggagaatccggtggcggcatcaatattgcactggccgcggagaaatatccggagaaagtgagcgccctcgtctttgtgaacgcacttatgcccgatatcgatcacagtccagcgttcgtgtataagaaatatagcgaagttttcactgactggaaagattcgatcttcagcaattatacctacggtaacgacacggttaccgcggtggaattgggagatcgtactctggccgagaacatcttctccaattctccgattgaagatgtagaactggcgaaacatcgtgtccgcaaaggctccttttttctgcaagacttggataccctgccgaactttacgtcggaagggtatggttcaattcgtcgtgtgtatgtttacggcgaagaagaccagatctttagccgcgattttcagttatggcaaattaataattataagcctgataaagtgtactgtgtaccgagtgctgaccacaagattatgatcagccgcgtcaacgagctggcccagattctccaagaagttgcaaactctgcgagtgatcttcttgcagtgctg

SEQ ID NO: 1302 - protein, 263 aa, synthetic construct
  REGION 1..263: note = Round 5 (Activity)
MVSAHFILIHSVCHGAWLWYKLIPLLQSAGHNVTAIDLWASGSNPRQLEQIGTWEQYSEPLFTLIESIPEGKKVILVGESGGGINIALAAEKYPEKVSALVFVNALMPDIDHSPAFVYKKYSEVFTDWKDSIFSNYTYGNDTVTAVELGDRTLAENIFSNSPIEDVELAKHRVRKGSFFLQDLDTLPNFTSEGYGSIRRVYVYGEEDQIFSRDFQLWQINNYKPDKVYCVPSADHKIMISRVNELAQILQEVANSASDLLAVL

SEQ ID NO: 1303 - DNA, 789 bp, synthetic construct
  misc_feature 1..789: note = Round 5 (Activity)
  source 1..789: mol_type = other DNA
atggttagtgcgcattttattctgatccacagtgtttgccatggcgcctggctgtggtataaactgatcccgttattacagtctgcaggtcataacgttacggcgattgatctttgggctagcgggagtaatcctcgccaactggaacagattggcacatgggagcagtactcagaaccattgttcaccctgatcgaatcgattccggaaggtaagaaagtcattctggtaggagaatccggtggcggcatcaatattgcactggccgcggagaaatatccggagaaagtgagcgccctcgtctttgtgaacgcacttatgcccgatatcgatcacagtccagcgttcgtgtataagaaatatagcgaagttttcactgactggaaagattcgatcttcagcaattatacctacggtaacgacacggttaccgcggtggaattgggagatcgtactctggccgagaacatcttctccaattctccgattgaagatgtagaactggcgaaacatcgtgtccgcaaaggctccttttttctgcaagacttggataccctgccgaactttacgtcggaagggtatggttcaattcgtcgtgtgtatgtttacggcgaagaagaccagatctttagccgcgattttcagttatggcaaattaataattataagcctgatcttgtgtactgtgtaccgagtgctgaccacaagattatgatcagccgcgtcaacgagctggcccagattctccaagaagttgcaaactctgcgagtgatcttcttgcagtggct

SEQ ID NO: 1304 - protein, 263 aa, synthetic construct
  REGION 1..263: note = Round 5 (Activity)
MVSAHFILIHSVCHGAWLWYKLIPLLQSAGHNVTAIDLWASGSNPRQLEQIGTWEQYSEPLFTLIESIPEGKKVILVGESGGGINIALAAEKYPEKVSALVFVNALMPDIDHSPAFVYKKYSEVFTDWKDSIFSNYTYGNDTVTAVELGDRTLAENIFSNSPIEDVELAKHRVRKGSFFLQDLDTLPNFTSEGYGSIRRVYVYGEEDQIFSRDFQLWQINNYKPDLVYCVPSADHKIMISRVNELAQILQEVANSASDLLAVA

SEQ ID NO: 1305 - DNA, 789 bp, synthetic construct
  misc_feature 1..789: note = Round 5 (Activity)
  source 1..789: mol_type = other DNA
atggttagtgcgcattttattctgatccacagtgtttgccatggcgcctggctgtggtataaactgatcccgttattacagtctgcaggtcataacgttacggcgattgatctttgggctagcgggagtaatcctcgccaactggaacagattggcacatgggagcagtactcagaaccattgttcaccctgatcgaatcgattccggaaggtaagaaagtcattctggtaggagaatccggtggcggcatcaatattgcactggccgcggagaaatatccggagaaagtgagcgccctcgtctttgtgaacgcacttatgcccgatatcgatcacagtccagcgttcgtgtataagaaatatagcgaagttttcactgactggaaagattcgatcttcagcaattatcggtacggtaacgacacggttaccgcggtggaattgggagatcgtactctggccgagaacatcttctccaattctccgattgaagatgtagaactggcgaaacatcgtgtccgcaaaggctccttttttctgcaagacttggataccctgccgaactttacgtcggaagggtatggttcaattcgtcgtgtgtatgtttacggcgaagaagaccagatctttagccgcgattttcagttatggcaaattaataattataagcctgataaagtgtactgtgtaccgagtgctgaccacaagattatgatcagccgcgtcaacgagctggcccagattctccaagaagttgcaaactctgcgagtgatcttcttgcagtggct

SEQ ID NO: 1306 - protein, 263 aa, synthetic construct
  REGION 1..263: note = Round 5 (Activity)
MVSAHFILIHSVCHGAWLWYKLIPLLQSAGHNVTAIDLWASGSNPRQLEQIGTWEQYSEPLFTLIESIPEGKKVILVGESGGGINIALAAEKYPEKVSALVFVNALMPDIDHSPAFVYKKYSEVFTDWKDSIFSNYRYGNDTVTAVELGDRTLAENIFSNSPIEDVELAKHRVRKGSFFLQDLDTLPNFTSEGYGSIRRVYVYGEEDQIFSRDFQLWQINNYKPDKVYCVPSADHKIMISRVNELAQILQEVANSASDLLAVA

SEQ ID NO: 1307 - DNA, 789 bp, synthetic construct
  misc_feature 1..789: note = Round 5 (Activity)
  source 1..789: mol_type = other DNA
atggttagtgcgcattttattctgatccacagtgtttgccatggcgcctggctgtggtataaactgatcccgttattacagtctcgtggtcataacgttacggcgattgatctttgggctagcgggagtaatcctcgccaactggaacagattggcacatgggagcagtactcagaaccattgttcaccctgatcgaatcgattccggaaggtaagaaagtcattctggtaggagaatccggtggcggcatcaatattgcactggccgcggagaaatatccggagaaagtgagcgccctcgtctttgtgaacgcacttatgcccgatatcgatcacagtccagcgttcgtgtataagaaatatagcgaagttttcactgactggaaagattcgatcttcagcaattatacctacggtaacgacacggttaccgcggtggaattgggagatcgtactctggccgagaacatcttctccaattctccgattgaagatgtagaactggcgaaacatcgtgtccgcaaaggctccttttttctgcaagacttggataccctgccgaactttacgtcggaagggtatggttcaattcgtcgtgtgtatgtttacggcgaagaagaccagatctttagccgcgattttcagttatggcaaattaataattataagcctgataaagtgtactgtgtaccgagtgctgaccacaagattatgatcagccgcgtcaacgagctggcccagattctccaagaagttgcaaactctgcgagtgatcttcttgcagtggct

SEQ ID NO: 1308 - protein, 263 aa, synthetic construct
  REGION 1..263: note = Round 5 (Activity)
MVSAHFILIHSVCHGAWLWYKLIPLLQSRGHNVTAIDLWASGSNPRQLEQIGTWEQYSEPLFTLIESIPEGKKVILVGESGGGINIALAAEKYPEKVSALVFVNALMPDIDHSPAFVYKKYSEVFTDWKDSIFSNYTYGNDTVTAVELGDRTLAENIFSNSPIEDVELAKHRVRKGSFFLQDLDTLPNFTSEGYGSIRRVYVYGEEDQIFSRDFQLWQINNYKPDKVYCVPSADHKIMISRVNELAQILQEVANSASDLLAVA

SEQ ID NO: 1309 - DNA, 789 bp, synthetic construct
  misc_feature 1..789: note = Round 5 (Activity)
  source 1..789: mol_type = other DNA
atggttagtgcgcattttattctgatccacagtgtttgccatggcgcctggctgtggtataaactgatcccgttattacagtctgcaggtcataacgttacggcgattgatctttgggctagcgggagtaatcctcgccaactggaacagattggcacatgggagcagtactcagggccattgttcaccctgatcgaatcgattccggaaggtaagaaagtcattctggtaggagaatccggtggcggcatcaatattgcactggccgcggagaaatatccggagaaagtgagcgccctcgtctttgtgaacgcacttatgcccgatatcgatcacagtccagcgttcgtgtataagaaatatagcgaagttttcactgactggaaagattcgatcttcagcaattatacctacggtaacgacacggttaccgcggtggaattgggagatcgtactctggccgagaacatcttctccaattctccgattgaagatgtagaactggcgaaacatcgtgtccgcaaaggctccttttttctgcaagacttggataccctgccgaactttacgtcggaagggtatggttcaattcgtcgtgtgtatgtttacggcgaagaagaccagatctttagccgcgattttcagttatggcaaattaataattataagcctgataaagtgtactgtgtaccgagtgctgaccacaagattatgatcagccgcgtcaacgagctggcccagattctccaagaagttgcaaactctgcgagtgatcttcttgcagtggct

SEQ ID NO: 1310 - protein, 263 aa, synthetic construct
  REGION 1..263: note = Round 5 (Activity)
MVSAHFILIHSVCHGAWLWYKLIPLLQSAGHNVTAIDLWASGSNPRQLEQIGTWEQYSGPLFTLIESIPEGKKVILVGESGGGINIALAAEKYPEKVSALVFVNALMPDIDHSPAFVYKKYSEVFTDWKDSIFSNYTYGNDTVTAVELGDRTLAENIFSNSPIEDVELAKHRVRKGSFFLQDLDTLPNFTSEGYGSIRRVYVYGEEDQIFSRDFQLWQINNYKPDKVYCVPSADHKIMISRVNELAQILQEVANSASDLLAVA

SEQ ID NO: 1311 - DNA, 789 bp, synthetic construct
  misc_feature 1..789: note = Round 5 (Activity)
  source 1..789: mol_type = other DNA
atggttagtgcgcattttattctgatccacagtgtttgccatggcgcctggctgtggtataaactgatcccgttattacagtctgcaggtcataacgttacggcgattgatctttgggctagcgggagtaatcctcgccaactggaacagattggcacatgggagcagtactcagaaccattgttcaccctgatcgaatcgattccggaaggtaagaaagtcattctggtaggagaatccggtggcggcatcaatattgcactggccgcggagaaatatccggagaaagtgagcgccctcgtctttgtgaacgcacttatgcccgatatcgatcacagtccagcgttcgtgtataagaaatatagcgaagttttcactgactggaaagattcgatcttcagcaattatacctacggtaacgacacggttaccgcggtggaattgggagatcgtactctggccgagaacatcttctccaattctccgattgaagatgtagaactggcgaaacatcgtgtccgcaaaggctccttttttctgcaagacttggataccctgccgaactttacgtcggaagggtatggttcaattcgtcgtgtgtatgtttacggcgaagaagaccagatctttagccgcgattttcagttatggcaaattaataattattgtcctgataaagtgtactgtgtaccgagtgctgaccacaagattatgatcagccgcgtcaacgagctggcccagattctccaagaagttgcaaactctgcgagtgatcttcttgcagtggct

SEQ ID NO: 1312 - protein, 263 aa, synthetic construct
  REGION 1..263: note = Round 5 (Activity)
MVSAHFILIHSVCHGAWLWYKLIPLLQSAGHNVTAIDLWASGSNPRQLEQIGTWEQYSEPLFTLIESIPEGKKVILVGESGGGINIALAAEKYPEKVSALVFVNALMPDIDHSPAFVYKKYSEVFTDWKDSIFSNYTYGNDTVTAVELGDRTLAENIFSNSPIEDVELAKHRVRKGSFFLQDLDTLPNFTSEGYGSIRRVYVYGEEDQIFSRDFQLWQINNYCPDKVYCVPSADHKIMISRVNELAQILQEVANSASDLLAVA

SEQ ID NO: 1313 - DNA, 789 bp, synthetic construct
  misc_feature 1..789: note = Round 5 (Activity)
  source 1..789: mol_type = other DNA
atggttagtgcgcattttattctgatccacagtgtttgccatggcgcctggctgtggtataaactgatcccgttattacagtctgcaggtcataacgttacggcgattgatctttgggctagcgggagtaatcctcgccaactggaacagattggcacatgggagcagtactcagaaccattgttcaccctgatcgaatcgattccggaaggtaagaaagtcattctggtaggagaatccggtggcggcatcaatattgcactggccgcggagaaatatccggagaaagtgagcgccctcgtctttgtgaacgcacttatgcccgatatcgatcacagtccagcgttcgtgtataagaaatatagcgaagttttcactgactggaaagattcgatcttcagcaattatacctacggtaacgacacggttaccgcggtggaattgggagatcgtactctggccgagaacatcttctccaattctccgattgaagatgtagaactggcgaaacatcgtgtccgcaaaggctccttttttctgcaagacttggataccctgccgaactttacgtcggaagggtatggttcaattcgtcgtgtgtatgtttacggcgaagaagaccagatctttagccgcgattttcagatgtggcaaattaataattataagcctgataaagtgtactgtgtaccgagtgctgaccacaagattatgatcagccgcgtcaacgagctggcccagattctccaagaagttgcaaactctgcgagtgatcttcttgcagtggct

SEQ ID NO: 1314 - protein, 263 aa, synthetic construct
  REGION 1..263: note = Round 5 (Activity)
MVSAHFILIHSVCHGAWLWYKLIPLLQSAGHNVTAIDLWASGSNPRQLEQIGTWEQYSEPLFTLIESIPEGKKVILVGESGGGINIALAAEKYPEKVSALVFVNALMPDIDHSPAFVYKKYSEVFTDWKDSIFSNYTYGNDTVTAVELGDRTLAENIFSNSPIEDVELAKHRVRKGSFFLQDLDTLPNFTSEGYGSIRRVYVYGEEDQIFSRDFQMWQINNYKPDKVYCVPSADHKIMISRVNELAQILQEVANSASDLLAVA

SEQ ID NO: 1315 - DNA, 789 bp, synthetic construct
  misc_feature 1..789: note = Round 5 (Activity)
  source 1..789: mol_type = other DNA
atggttagtgcgcattttattctgatccacagtgtttgccatggcgcctggctgtggtataaactgatcccgttattacagtctgcaggtcataacgttacggcgattgatctttgggctagcgggagtaatcctcgccaactggaacagattggcacatgggagcagtactcagaaccattgttcaccctgatcgaatcgattccggaaggtaagaaagtcattctggtaggagaatccggtggcggcatcaatattgcactggccgcggagaaatatccggagaaagtgagcgccctcgtctttgtgaacgcacttatgcccgatatcgatcacagtccagcgttcgtgtataagaaatatagcgaagttttcactgactggaaagattcgatcttcagcaattatacctacggtaacgacacggttaccgcggtggaattgggagatcgtactctggccgagaacatcttctccaattctccgattgaagatgtagaactggcgaaacatcgtgtccgcaaaggctccttttttctgcaagacttggataccctgccgaactttacgtcggaagggtatggttcaattcgtcgtgtgtatgtttacggcgaagaagaccagatctttagccgcgattttcagttatggcaaattaataattatgagcctgataaagtgtactgtgtaccgagtgctgaccacaagattatgatcagccgcgtcaacgagctggcccagattctccaagaagttgcaaactctgcgagtgatcttcttgcagtggct

SEQ ID NO: 1316 - protein, 263 aa, synthetic construct
  REGION 1..263: note = Round 5 (Activity)
MVSAHFILIHSVCHGAWLWYKLIPLLQSAGHNVTAIDLWASGSNPRQLEQIGTWEQYSEPLFTLIESIPEGKKVILVGESGGGINIALAAEKYPEKVSALVFVNALMPDIDHSPAFVYKKYSEVFTDWKDSIFSNYTYGNDTVTAVELGDRTLAENIFSNSPIEDVELAKHRVRKGSFFLQDLDTLPNFTSEGYGSIRRVYVYGEEDQIFSRDFQLWQINNYEPDKVYCVPSADHKIMISRVNELAQILQEVANSASDLLAVA

SEQ ID NO: 1317 - DNA, 789 bp, synthetic construct
  misc_feature 1..789: note = Round 5 (Activity)
  source 1..789: mol_type = other DNA
atggttagtgcgcattttattctgatccacagtgtttgccatggcgcctggctgtggtataaactgatcccgttattacagtctgcaggtcataacgttacggcgattgatctttgggctagcgggagtaatcctcgccaactggaacagattggcacatgggagcagtactcagaaccattgttcaccctgatcgaatcgattccggaaggtaagaaagtcattctggtaggagaatccggtggcggcatcaatattgcactggccgcggagaaatatccggagaaagtgagcgccctcgtctttgtgaacgcacttatgcccgatatcgatcacagtccagcgttcgtgtataagaaatatagcgaagttttcactgactggaaagattcgatcttcagcaattatacctacggtaacgacacggttaccgcggtggaattgggagatcgtactctggccgagaacatcttctccaattctccgattgaagatgtagaactggcgaaacatcgtgtccgcaaaggctccttttttctgcaagacttggataccctgccgaactttacgtcggaagggtatggttcaattcgtcgtgtgtatgtttacggcgaagaagaccagatctttagccgcgattttcagttatggcaaattaataattataagcctgataaagtgtactgtgtaccgagtgctgaccacaagattatgatcagccgcgtcaacgagctggcccagattctccaagaagttgcaaactctgcgagtgatcttcttgcagtggag

SEQ ID NO: 1318 - protein, 263 aa, synthetic construct
  REGION 1..263: note = Round 5 (Activity)
MVSAHFILIHSVCHGAWLWYKLIPLLQSAGHNVTAIDLWASGSNPRQLEQIGTWEQYSEPLFTLIESIPEGKKVILVGESGGGINIALAAEKYPEKVSALVFVNALMPDIDHSPAFVYKKYSEVFTDWKDSIFSNYTYGNDTVTAVELGDRTLAENIFSNSPIEDVELAKHRVRKGSFFLQDLDTLPNFTSEGYGSIRRVYVYGEEDQIFSRDFQLWQINNYKPDKVYCVPSADHKIMISRVNELAQILQEVANSASDLLAVE

SEQ ID NO: 1319 - DNA, 789 bp, synthetic construct
  misc_feature 1..789: note = Round 5 (Activity)
  source 1..789: mol_type = other DNA
atggttagtgcgcattttattctgatccacagtgtttgccatggcgcctggctgtggtataaactgatcccgttattacagtctgcaggtcatcgtgttacggcgattgatctttgggctagcgggagtaatcctcgccaactggaacagattggcacatgggagcagtactcagaaccattgttcaccctgatcgaatcgattccggaaggtaagaaagtcattctggtaggagaatccggtggcggcatcaatattgcactggccgcggagaaatatccggagaaagtgagcgccctcgtctttgtgaacgcacttatgcccgatatcgatcacagtccagcgttcgtgtataagaaatatagcgaagttttcactgactggaaagattcgatcttcagcaattatacctacggtaacgacacggttaccgcggtggaattgggagatcgtactctggccgagaacatcttctccaattctccgattgaagatgtagaactggcgaaacatcgtgtccgcaaaggctccttttttctgcaagacttggataccctgccgaactttacgtcggaagggtatggttcaattcgtcgtgtgtatgtttacggcgaagaagaccagatctttagccgcgattttcagttatggcaaattaataattataagcctgataaagtgtactgtgtaccgagtgctgaccacaagattatgatcagccgcgtcaacgagctggcccagattctccaagaagttgcaaactctgcgagtgatcttcttgcagtggct

SEQ ID NO: 1320 - protein, 263 aa, synthetic construct
  REGION 1..263: note = Round 5 (Activity)
MVSAHFILIHSVCHGAWLWYKLIPLLQSAGHRVTAIDLWASGSNPRQLEQIGTWEQYSEPLFTLIESIPEGKKVILVGESGGGINIALAAEKYPEKVSALVFVNALMPDIDHSPAFVYKKYSEVFTDWKDSIFSNYTYGNDTVTAVELGDRTLAENIFSNSPIEDVELAKHRVRKGSFFLQDLDTLPNFTSEGYGSIRRVYVYGEEDQIFSRDFQLWQINNYKPDKVYCVPSADHKIMISRVNELAQILQEVANSASDLLAVA

SEQ ID NO: 1321 - DNA, 789 bp, synthetic construct
  misc_feature 1..789: note = Round 5 (Activity)
  source 1..789: mol_type = other DNA
atggttagtgcgcattttattctgatccacagtgtttgccatggcgcctggctgtggtataaactgatcccgttattacagtctgcaggtcataacgttacggcgattgatctttgggctagcgggagtaatcctcgccaactggaacagattggcacatgggagcagtactcagaaccattgttcaccctgatcgaatcgattccggaaggtaagaaagtcattctggtaggagaatccggtggcggcatcaatattgcactggccgcggagaaatatccggagaaagtgagcgccctcgtctttgtgaacgcacttatgcccgatatcgatcacagtccagcgttcgtgtataagaaatatagcgaagttttcactgactggaaagattcgatcttcagcaattatacctacggtaacgacacggttaccgcggtggaattgggagatcgtactctggccgagaacatcttctccaattctccgattgaagatgtagaactggcgaaacatcgtgtccgcaaaggctccttttttctgcaagacttggataccctgccgaactttacgtcggaagggtatggttcaattcgtcgtgtgtatgtttacggcgaagaagaccagatctttagccgcgattttcagttatggcaaattaataattatgcgcctgataaagtgtactgtgtaccgagtgctgaccacaagattatgatcagccgcgtcaacgagctggcccagattctccaagaagttgcaaactctgcgagtgatcttcttgcagtggct

SEQ ID NO: 1322 - protein, 263 aa, synthetic construct
  REGION 1..263: note = Round 5 (Activity)
MVSAHFILIHSVCHGAWLWYKLIPLLQSAGHNVTAIDLWASGSNPRQLEQIGTWEQYSEPLFTLIESIPEGKKVILVGESGGGINIALAAEKYPEKVSALVFVNALMPDIDHSPAFVYKKYSEVFTDWKDSIFSNYTYGNDTVTAVELGDRTLAENIFSNSPIEDVELAKHRVRKGSFFLQDLDTLPNFTSEGYGSIRRVYVYGEEDQIFSRDFQLWQINNYAPDKVYCVPSADHKIMISRVNELAQILQEVANSASDLLAVA

SEQ ID NO: 1323 - DNA, 789 bp, synthetic construct
  misc_feature 1..789: note = Round 5 (Activity)
  source 1..789: mol_type = other DNA
atggttagtgcgcattttattctgatccacagtgtttgccatggcgcctggctgtggtataaactgatcccgttattacagtctgcaggtcataacgttacggcgattgatctttgggctagcgggagtaatcctcgccaactggaacagattggcacatgggagcagtactcagaaccattgttcaccctgatcgaatcgattccggaaggtaagaaagtcattctggtaggagaatccggtggcggcatcaatattgcactggccgcggagaaatatccggagaaagtgagcgccctcgtctttgtgaacgcacttatgcccgatatcgatcacagtccagcgttcgtgtataagaaatatagcgaagttttcactgactggaaagattcgatcttcagcaattatacctacggtaacgacacggttaccgcggtggaattgggagatcgtactctggccgagaacatcttctccaattctccgattgaagatgtagaactggcgaaacatcgtgtccgcaaaggctccttttttctgcaagacttggataccctgccgaactttacgtcggaagggtatggttcaattcgtcgtgtgtatgtttacggcgaagaagaccagatctttagccgcgattttcagttatggcaaattaataattataagcctgataaagtgtacctggtaccgagtgctgaccacaagattatgatcagccgcgtcaacgagctggcccagattctccaagaagttgcaaactctgcgagtgatcttcttgcagtggct

SEQ ID NO: 1324 - protein, 263 aa, synthetic construct
  REGION 1..263: note = Round 5 (Activity)
MVSAHFILIHSVCHGAWLWYKLIPLLQSAGHNVTAIDLWASGSNPRQLEQIGTWEQYSEPLFTLIESIPEGKKVILVGESGGGINIALAAEKYPEKVSALVFVNALMPDIDHSPAFVYKKYSEVFTDWKDSIFSNYTYGNDTVTAVELGDRTLAENIFSNSPIEDVELAKHRVRKGSFFLQDLDTLPNFTSEGYGSIRRVYVYGEEDQIFSRDFQLWQINNYKPDKVYLVPSADHKIMISRVNELAQILQEVANSASDLLAVA

SEQ ID NO: 1325 - DNA, 789 bp, synthetic construct
  misc_feature 1..789: note = Round 5 (Activity)
  source 1..789: mol_type = other DNA
atggttagtgcgcattttattctgatccacagtgtttgccatggcgcctggctgtggtataaactgatcccgttattacagtctgcaggtcataacgttacggcgattgatctttgggctagcgggagtaatcctcgccaactggaacagattggcacatgggagcagtactcagaaccattgttcaccctgatcgaatcgattccggaaggtaagaaagtcattctggtaggagaatccggtggcggcatcaatattgcactggccgcggagaaatatccggagaaagtgagcgccctcgtctttgtgaacgcacttatgcccgatatcgatcacagtccagcgttcgtgtataagaaatatagcgaagttttcactgactggaaagattcgatcttcagcaattatacctacggtaacgacacggttaccgcggtggaattgggagatcgtactctggccgagaacatcttctccaattctccgattgaagatgtagaactggcgaaacatcgtgtccgcaaaggctccttttttctgcaagacttggataccctgccgaactttacgtcggaagggtatggttcaattcgtcgtgtgtatgtttacggcgaagaagaccagatctttagccgcgattttcaggtttggcaaattaataattataagcctgataaagtgtactgtgtaccgagtgctgaccacaagattatgatcagccgcgtcaacgagctggcccagattctccaagaagttgcaaactctgcgagtgatcttcttgcagtggct

SEQ ID NO: 1326 - protein, 263 aa, synthetic construct
  REGION 1..263: note = Round 5 (Activity)
MVSAHFILIHSVCHGAWLWYKLIPLLQSAGHNVTAIDLWASGSNPRQLEQIGTWEQYSEPLFTLIESIPEGKKVILVGESGGGINIALAAEKYPEKVSALVFVNALMPDIDHSPAFVYKKYSEVFTDWKDSIFSNYTYGNDTVTAVELGDRTLAENIFSNSPIEDVELAKHRVRKGSFFLQDLDTLPNFTSEGYGSIRRVYVYGEEDQIFSRDFQVWQINNYKPDKVYCVPSADHKIMISRVNELAQILQEVANSASDLLAVA

SEQ ID NO: 1327 - DNA, 789 bp, synthetic construct
  misc_feature 1..789: note = Round 5 (Activity)
  source 1..789: mol_type = other DNA
atggttagtgcgcattttattctgatccacagtgtttgccatggcgcctggctgtggtataaactgatcccgttattacagtctgcaggtcataacgttacggcgattgatctttgggctagcgggagtaatcctcgccaactggaacagattggcacatgggagcagtactcagaaccattgttcaccctgatcgaatcgattccggaaggtaagaaagtcattctggtaggagaatccggtggcggcatcaatattgcactggccgcggagaaatatccggagaaagtgagcgccctcgtctttgtgaacgcacttatgcccgatatcgatcacagtccagcgttcgtgtataagaaatatagcgaagttttcactgactggaaagattcgatcttcagcaattatacctacggtaacgacgttgttaccgcggtggaattgggagatcgtactctggccgagaacatcttctccaattctccgattgaagatgtagaactggcgaaacatcgtgtccgcaaaggctccttttttctgcaagacttggataccctgccgaactttacgtcggaagggtatggttcaattcgtcgtgtgtatgtttacggcgaagaagaccagatctttagccgcgattttcagttatggcaaattaataattataagcctgataaagtgtactgtgtaccgagtgctgaccacaagattatgatcagccgcgtcaacgagctggcccagattctccaagaagttgcaaactctgcgagtgatcttcttgcagtggct

SEQ ID NO: 1328 - protein, 263 aa, synthetic construct
  REGION 1..263: note = Round 5 (Activity)
MVSAHFILIHSVCHGAWLWYKLIPLLQSAGHNVTAIDLWASGSNPRQLEQIGTWEQYSEPLFTLIESIPEGKKVILVGESGGGINIALAAEKYPEKVSALVFVNALMPDIDHSPAFVYKKYSEVFTDWKDSIFSNYTYGNDVVTAVELGDRTLAENIFSNSPIEDVELAKHRVRKGSFFLQDLDTLPNFTSEGYGSIRRVYVYGEEDQIFSRDFQLWQINNYKPDKVYCVPSADHKIMISRVNELAQILQEVANSASDLLAVA

SEQ ID NO: 1329 - DNA, 789 bp, synthetic construct
  misc_feature 1..789: note = Round 5 (Activity)
  source 1..789: mol_type = other DNA
atggttagtgcgcattttattctgatccacagtgtttgccatggcgcctggctgtggtataaactgatcccgttattacagtctgcaggtcataacgttacggcgattgatctttgggctagcgggagtaatcctcgccaactggaacagattggcacatgggagcagtactcagaaccattgttcaccctgatcgaaaatattccggaaggtaagaaagtcattctggtaggagaatccggtggcggcatcaatattgcactggccgcggagaaatatccggagaaagtgagcgccctcgtctttgtgaacgcacttatgcccgatatcgatcacagtccagcgttcgtgtataagaaatatagcgaagttttcactgactggaaagattcgatcttcagcaattatacctacggtaacgacacggttaccgcggtggaattgggagatcgtactctggccgagaacatcttctccaattctccgattgaagatgtagaactggcgaaacatcgtgtccgcaaaggctccttttttctgcaagacttggataccctgccgaactttacgtcggaagggtatggttcaattcgtcgtgtgtatgtttacggcgaagaagaccagatctttagccgcgattttcagttatggcaaattaataattataagcctgataaagtgtactgtgtaccgagtgctgaccacaagattatgatcagccgcgtcaacgagctggcccagattctccaagaagttgcaaactctgcgagtgatcttcttgcagtggct

SEQ ID NO: 1330 - protein, 263 aa, synthetic construct
  REGION 1..263: note = Round 5 (Activity)
MVSAHFILIHSVCHGAWLWYKLIPLLQSAGHNVTAIDLWASGSNPRQLEQIGTWEQYSEPLFTLIENIPEGKKVILVGESGGGINIALAAEKYPEKVSALVFVNALMPDIDHSPAFVYKKYSEVFTDWKDSIFSNYTYGNDTVTAVELGDRTLAENIFSNSPIEDVELAKHRVRKGSFFLQDLDTLPNFTSEGYGSIRRVYVYGEEDQIFSRDFQLWQINNYKPDKVYCVPSADHKIMISRVNELAQILQEVANSASDLLAVA

SEQ ID NO: 1331 - DNA, 789 bp, synthetic construct
  misc_feature 1..789: note = Round 5 (Activity)
  source 1..789: mol_type = other DNA
atggttagtgcgcattttattctgatccacagtgtttgccatggcgcctggctgtggtataaactgatcccgttattacagtctgcaggtcataacgttacggcgattgatctttgggctagcgggagtaatcctcgccaactggaacagattggcacatgggagcagtactcagaaccattgttcaccctgatcgaatcgattccggaaggtaagaaagtcattctggtaggagaatccggtggcggcatcaatattgcactggccgcggagaaatatccggagaaagtgagcgccctcgtctttgtgaacgcacttatgcccgatatcgatcacagtccagcgttcgtgtataagaaatatagcgaagttttcactgactggaaagattcgatcttcagcaattatacctacggtaacgacacggttaccgcggtggaattgggagatcgtactctggccgagaacatcttctccaattctccgattgaagatgtagaactggcgaaacatcgtgtccgcaaaggctccttttttctgcaagacttggataccctgccgaactttacgtcggaagggtatggttcaattcgtcgtgtgtatgtttacggcggggaagaccagatctttagccgcgattttcagttatggcaaattaataattataagcctgataaagtgtactgtgtaccgagtgctgaccacaagattatgatcagccgcgtcaacgagctggcccagattctccaagaagttgcaaactctgcgagtgatcttcttgcagtggct

SEQ ID NO: 1332 - protein, 263 aa, synthetic construct
  REGION 1..263: note = Round 5 (Activity)
MVSAHFILIHSVCHGAWLWYKLIPLLQSAGHNVTAIDLWASGSNPRQLEQIGTWEQYSEPLFTLIESIPEGKKVILVGESGGGINIALAAEKYPEKVSALVFVNALMPDIDHSPAFVYKKYSEVFTDWKDSIFSNYTYGNDTVTAVELGDRTLAENIFSNSPIEDVELAKHRVRKGSFFLQDLDTLPNFTSEGYGSIRRVYVYGGEDQIFSRDFQLWQINNYKPDKVYCVPSADHKIMISRVNELAQILQEVANSASDLLAVA

SEQ ID NO: 1333 - DNA, 789 bp, synthetic construct
  misc_feature 1..789: note = Round 5 (Activity)
  source 1..789: mol_type = other DNA
atggttagtgcgcattttattctgatccacagtgtttgccatggcgcctggctgtggtataaactgatcccgttattacagtctgcaggtcataacgttacggcgattgatctttgggctagcgggagtaatcctcgccaactggaacagattggcacatgggagcagtactcagaaccattgttcaccctgatcgaatcgattccggaaggtaagaaagtcattctggtaggagaatccggtggcggcatcaatattgcactggccgcggagaaatatccggagaaagtgagcgccctcgtctttgtgaacgcacttatgcccgatatcgatcacagtccagcgttcgtgtataagaaatatagcgaagttttcactgactggaaagattcgatcttcagcaattatacctacggtaacgacacggttaccgcggtggaattgggagatcgtactctggccgagaacatcttctccaattctccgattgaagatgtagaactggcgaaacatcgtgtccgcaaaggctccttttttctgcaagacttggataccctgccgaactttacgtcggaagggtatggttcaattcgtcgtgtgtatgtttacggcgaagaagaccagatctttagccgcgattttcagttatggcaaattaataattataagcctgataaagtgtactgtgtaccgagtgctgaccacaagattatgatcagccgcgtcaacgagctggccgtgattctccaagaagttgcaaactctgcgagtgatcttcttgcagtggct

SEQ ID NO: 1334 - protein, 263 aa, synthetic construct
  REGION 1..263: note = Round 5 (Activity)
MVSAHFILIHSVCHGAWLWYKLIPLLQSAGHNVTAIDLWASGSNPRQLEQIGTWEQYSEPLFTLIESIPEGKKVILVGESGGGINIALAAEKYPEKVSALVFVNALMPDIDHSPAFVYKKYSEVFTDWKDSIFSNYTYGNDTVTAVELGDRTLAENIFSNSPIEDVELAKHRVRKGSFFLQDLDTLPNFTSEGYGSIRRVYVYGEEDQIFSRDFQLWQINNYKPDKVYCVPSADHKIMISRVNELAVILQEVANSASDLLAVA

SEQ ID NO: 1335 - DNA, 789 bp, synthetic construct
  misc_feature 1..789: note = Round 5 (Activity)
  source 1..789: mol_type = other DNA
atggttagtgcgcattttattctgatccacagtgtttgccatggcgcctggctgtggtataaactgatcccgttattacagtctgcaggtcataacgttacggcgattgatctttgggctagcgggagtaatcctcgccaactggaacagattggcacatgggagcagtactcagaaccattgttcaccctgatcgaatcgattccggaaggtaagaaagtcattctggtaggagaatccggtggcggcatcaatattgcactggccgcggagaaatatccggagaaagtgagcgccctcgtctttgtgaacgcacttatgcccgatatcgatcacagtccagcgttcgtgtataagaaatatagcgaagttttcactgactggaaagattcgatcttcagcaattatacctacggtaacgacacggttaccgcggtggaattgggagatcgtactctggccgagaacatcttctccaattctccgattgaagatgtagaactggcgaaacatcgtgtccgcaaaggctccttttttctgcaagacttggataccctgccgaactttacgtcggaagggtatggttcaattcgtcgtgtgtatgtttacggcgaagaagaccagatctttagccgcgattttcagttatggcaaattaataattataagcctgataaagtgtactgtgtaccgagtgctgaccacaagattatgatcagccgcgtcaacgagctggcccagattctccaagaagttgcaaactctgcgagtgatcttcttcatgtggct

SEQ ID NO: 1336 - protein, 263 aa, synthetic construct
  REGION 1..263: note = Round 5 (Activity)
MVSAHFILIHSVCHGAWLWYKLIPLLQSAGHNVTAIDLWASGSNPRQLEQIGTWEQYSEPLFTLIESIPEGKKVILVGESGGGINIALAAEKYPEKVSALVFVNALMPDIDHSPAFVYKKYSEVFTDWKDSIFSNYTYGNDTVTAVELGDRTLAENIFSNSPIEDVELAKHRVRKGSFFLQDLDTLPNFTSEGYGSIRRVYVYGEEDQIFSRDFQLWQINNYKPDKVYCVPSADHKIMISRVNELAQILQEVANSASDLLHVA

SEQ ID NO: 1337 - DNA, 789 bp, synthetic construct
  misc_feature 1..789: note = Round 5 (Activity)
  source 1..789: mol_type = other DNA
atggttagtgcgcattttattctgatccacagtgtttgccatggcgcctggctgtggtataaactgatcccgttattacagtctgcaggtcataacgttacggcgattgatctttgggctagcgggagttctcctcgccaactggaacagattggcacatgggagcagtactcagaaccattgttcaccctgatcgaatcgattccggaaggtaagaaagtcattctggtaggagaatccggtggcggcatcaatattgcactggccgcggagaaatatccggagaaagtgagcgccctcgtctttgtgaacgcacttatgcccgatatcgatcacagtccagcgttcgtgtataagaaatatagcgaagttttcactgactggaaagattcgatcttcagcaattatacctacggtaacgacacggttaccgcggtggaattgggagatcgtactctggccgagaacatcttctccaattctccgattgaagatgtagaactggcgaaacatcgtgtccgcaaaggctccttttttctgcaagacttggataccctgccgaactttacgtcggaagggtatggttcaattcgtcgtgtgtatgtttacggcgaagaagaccagatctttagccgcgattttcagttatggcaaattaataattataagcctgataaagtgtactgtgtaccgagtgctgaccacaagattatgatcagccgcgtcaacgagctggcccagattctccaagaagttgcaaactctgcgagtgatcttcttgcagtggct

SEQ ID NO: 1338 - protein, 263 aa, synthetic construct
  REGION 1..263: note = Round 5 (Activity)
MVSAHFILIHSVCHGAWLWYKLIPLLQSAGHNVTAIDLWASGSSPRQLEQIGTWEQYSEPLFTLIESIPEGKKVILVGESGGGINIALAAEKYPEKVSALVFVNALMPDIDHSPAFVYKKYSEVFTDWKDSIFSNYTYGNDTVTAVELGDRTLAENIFSNSPIEDVELAKHRVRKGSFFLQDLDTLPNFTSEGYGSIRRVYVYGEEDQIFSRDFQLWQINNYKPDKVYCVPSADHKIMISRVNELAQILQEVANSASDLLAVA

SEQ ID NO: 1339 - DNA, 789 bp, synthetic construct
  misc_feature 1..789: note = Round 5 (Activity)
  source 1..789: mol_type = other DNA
atggttagtgcgcattttattctgatccacagtgtttgccatggcgcctggctgtggtataaactgatcccgttattacagtctgcaggtcataacgttacggcgattgatctttgggctagcgggagtaatcctcgccaactggaacagattggcacatgggagcagtactcagaaccattgttcaccctgatcgaatcgattccggaaggtaagaaagtcattctggtaggagaatccggtggcggcatcaatattgcactggccgcggagaaatatccggagaaagtgagcgccctcgtctttgtgaacgcacttatgcccgatatcgatcacagtccagcgttcgtgtataagaaatatagcgaagttttcactgactggaaagattcgatcttcagcaattatacctacggtaacgacacggttaccgcggtggaattgggagatcgtactctggccgagaacatcttctccaattctccgattgaagatgtagaactggcgaaacatcgtgtccgcaaaggctccttttttctgcaagacttggataccctgccgaactttacgtcggaagggtatggttcaattcgtcgtgtgtatgtttacggcctggaagaccagatctttagccgcgattttcagttatggcaaattaataattataagcctgataaagtgtactgtgtaccgagtgctgaccacaagattatgatcagccgcgtcaacgagctggcccagattctccaagaagttgcaaactctgcgagtgatcttcttgcagtggct

SEQ ID NO: 1340 - protein, 263 aa, synthetic construct
  REGION 1..263: note = Round 5 (Activity)
MVSAHFILIHSVCHGAWLWYKLIPLLQSAGHNVTAIDLWASGSNPRQLEQIGTWEQYSEPLFTLIESIPEGKKVILVGESGGGINIALAAEKYPEKVSALVFVNALMPDIDHSPAFVYKKYSEVFTDWKDSIFSNYTYGNDTVTAVELGDRTLAENIFSNSPIEDVELAKHRVRKGSFFLQDLDTLPNFTSEGYGSIRRVYVYGLEDQIFSRDFQLWQINNYKPDKVYCVPSADHKIMISRVNELAQILQEVANSASDLLAVA

SEQ ID NO: 1341 - DNA, 789 bp, synthetic construct
  misc_feature 1..789: note = Round 5 (Activity)
  source 1..789: mol_type = other DNA
atggttagtgcgcattttattctgatccacagtgtttgccatggcgcctggctgtggtataaactgatcccgttattacagtctgcaggtcataacgttacggcgattgatctttgggctagcgggagtaatcctcgccaactggaacagattggcacatgggagcagtactcagaaccattgttcaccctgatcgaatcgattccggaaggtaagaaagtcattctggtaggagaatccggtggcggcatcaatattgcactggccgcggagaaatatccggagaaagtgagcgccctcgtctttgtgaacgcacttatgcccgatatcgatcacagtccagcgttcgtgtataagaaatatagcgaagttttcactgactggaaagattcgatcttcagcaattatacctacggtaacgacacggttaccgcggtggaattgggagatcgtactctggccgagaacatcttctccaattctccgattgaagatgtagaactggcgaaacatcgtgtccgcaaaggctccttttttctgcaagacttgtcgaccctgccgaactttacgtcggaagggtatggttcaattcgtcgtgtgtatgtttacggcgaagaagaccagatctttagccgcgattttcagttatggcaaattaataattataagcctgataaagtgtactgtgtaccgagtgctgaccacaagattatgatcagccgcgtcaacgagctggcccagattctccaagaagttgcaaactctgcgagtgatcttcttgcagtggct

SEQ ID NO: 1342 - protein, 263 aa, synthetic construct
  REGION 1..263: note = Round 5 (Activity)
MVSAHFILIHSVCHGAWLWYKLIPLLQSAGHNVTAIDLWASGSNPRQLEQIGTWEQYSEPLFTLIESIPEGKKVILVGESGGGINIALAAEKYPEKVSALVFVNALMPDIDHSPAFVYKKYSEVFTDWKDSIFSNYTYGNDTVTAVELGDRTLAENIFSNSPIEDVELAKHRVRKGSFFLQDLSTLPNFTSEGYGSIRRVYVYGEEDQIFSRDFQLWQINNYKPDKVYCVPSADHKIMISRVNELAQILQEVANSASDLLAVA

SEQ ID NO: 1343 - DNA, 789 bp, synthetic construct
  misc_feature 1..789: note = Round 5 (Activity)
  source 1..789: mol_type = other DNA
atggttagtgcgcattttattctgatccacagtgtttgccatggcgcctggctgtggtataaactgatcccgttattacagtctgcaggtcataacgttacggcgattgatctttgggctagcgggagtaatcctcgccaactggaacagattggcacatgggagcagtactcagaaccattgttcaccctgatcgaatcgattccggaaggtaagaaagtcattctggtaggagaatccggtggcggcatcaatattgcactggccgcggagaaatatccggagaaagtgagcgccctcgtctttgtgaacgcacttatgcccgatatcgatcacagtccagcgttcgtgtataagaaatatagcgaagttttcactgactggaaagattcgatcttcagcaattatacctacggtaacgacacggttaccgcggtggaattgggagatcgtactctggccgagaacatcttctccaattctccgattgaagatgtagaactggcgaaacatcgtgtccgcaaaggctccttttttctgcaagacttggataccctgccgaactttacgtcggaagggtatggttcaattcgtcgtgtgtatgtttacggcgaagaagaccagatctttagccgcgattttcagttatggcaaattaataattataagcctgataaagtgtacgttgtaccgagtgctgaccacaagattatgatcagccgcgtcaacgagctggcccagattctccaagaagttgcaaactctgcgagtgatcttcttgcagtggct

SEQ ID NO: 1344 - protein, 263 aa, synthetic construct
  REGION 1..263: note = Round 5 (Activity)
MVSAHFILIHSVCHGAWLWYKLIPLLQSAGHNVTAIDLWASGSNPRQLEQIGTWEQYSEPLFTLIESIPEGKKVILVGESGGGINIALAAEKYPEKVSALVFVNALMPDIDHSPAFVYKKYSEVFTDWKDSIFSNYTYGNDTVTAVELGDRTLAENIFSNSPIEDVELAKHRVRKGSFFLQDLDTLPNFTSEGYGSIRRVYVYGEEDQIFSRDFQLWQINNYKPDKVYVVPSADHKIMISRVNELAQILQEVANSASDLLAVA

SEQ ID NO: 1345 - DNA, 789 bp, synthetic construct
  misc_feature 1..789: note = Round 5 (Selectivity)
  source 1..789: mol_type = other DNA
atggttagtgcgcattttattctgatccacagtgtttgccatggcgcctggctgtggtataaactgatcccgttattacagtctgcaggtcataacgttacggcgattgatctttgggctagcgggagtaatcctcgccaactggaacagattggcacatgggagcagtactcagaaccattgttcaccctgatcgaatcgattccggaaggtaagaaagtcattctggtaggagaagggggtggcggcatcaatattgcactggccgcggagaaatatccggagaaagtgagcgccctcgtctttgtgaacgcacttatgcccgatatcgatcacagtccagcgttcgtgtataagaaatatagcgaagttttcactgactggaaagattcgatcttcagcaattatacctacggtaacgacacggttaccgcggtggaattgggagatcgtactctggccgagaacatcttctccaattctccgattgaagatgtagaactggcgaaacatcgtgtccgcaaaggctccttttttctgcaagacttggataccctgccgaactttacgtcggaagggtatggttcaattcgtcgtgtgtatgtttacggcgaagaagaccagatctttagccgcgattttcagttatggcaaattaataattataagcctgataaagtgtactgtgtaccgagtgctgaccacaagattatgatcagccgcgtcaacgagctggcccagattctccaagaagttgcaaactctgcgagtgatcttcttgcagtggct

SEQ ID NO: 1346 - protein, 263 aa, synthetic construct
  REGION 1..263: note = Round 5 (Selectivity)
MVSAHFILIHSVCHGAWLWYKLIPLLQSAGHNVTAIDLWASGSNPRQLEQIGTWEQYSEPLFTLIESIPEGKKVILVGEGGGGINIALAAEKYPEKVSALVFVNALMPDIDHSPAFVYKKYSEVFTDWKDSIFSNYTYGNDTVTAVELGDRTLAENIFSNSPIEDVELAKHRVRKGSFFLQDLDTLPNFTSEGYGSIRRVYVYGEEDQIFSRDFQLWQINNYKPDKVYCVPSADHKIMISRVNELAQILQEVANSASDLLAVA

SEQ ID NO: 1347 - DNA, 789 bp, synthetic construct
  misc_feature 1..789: note = Round 6 (Selectivity)
  source 1..789: mol_type = other DNA
atggttagtgcgcattttattctgatccacagtgtttgccatggcgcctggctgtggtataaactgatcccgttattacagtctgcaggtcataacgttacggcgattgatctttgggctagcgggagtaatcctcgccaactggaacagattggcacatgggagcagtactcagaaccattgttcaccctgatcgaatcgattccggaaggtaagaaagtcattctggtaggagaagcgggtggcggcatcaatattgcactggccgcggagaaatatccggagaaagtgagcgccctcgtctttgtgaacgcacttatgcccgatatcgatcacagtccagcgttcgtgtataagaaatatagcgaagttttcactgactggaaagattcgatcttcagcaattatacctacggtaacgacacggttaccgcggtggaattgggagatcgtactctggccgagaacatcttctccaattctccgattgaagatgtagaactggcgaaacatcgtgtccgcaaaggctccttttttctgcaagacttggataccctgccgaactttacgtcggaagggtatggttcaattcgtcgtgtgtatgtttacggcgaagaagaccagatctttagccgcgattttcagttatggcaaattaataattataagcctgataaagtgtactgtgtaccgagtgctgaccacaagattatgatcagccgcgtcaacgagctggcccagattctccaagaagttgcaaactctgcgagtgatcttcttgcagtggct

SEQ ID NO: 1348 - protein, 263 aa, synthetic construct
  REGION 1..263: note = Round 6 (Selectivity)
MVSAHFILIHSVCHGAWLWYKLIPLLQSAGHNVTAIDLWASGSNPRQLEQIGTWEQYSEPLFTLIESIPEGKKVILVGEAGGGINIALAAEKYPEKVSALVFVNALMPDIDHSPAFVYKKYSEVFTDWKDSIFSNYTYGNDTVTAVELGDRTLAENIFSNSPIEDVELAKHRVRKGSFFLQDLDTLPNFTSEGYGSIRRVYVYGEEDQIFSRDFQLWQINNYKPDKVYCVPSADHKIMISRVNELAQILQEVANSASDLLAVA

SEQ ID NO: 1349 - DNA, 789 bp, synthetic construct
  misc_feature 1..789: note = Round 5 (Selectivity)
  source 1..789: mol_type = other DNA
atggttagtgcgcattttattctgatccacagtgtttgccatggcgcctggctgtggtataaactgatcccgttattacagtctgcaggtcataacgttacggcgattgatctttgggctagcgggagtaatcctcgccaactggaacagattggcacatgggagcagtactcagaaccattgttcaccctgatcgaatcgattccggaaggtaagaaagtcattctggtaggagaatccggtggcggcatcaatattgcactggccgcggagaaatatccggagaaagtgagcgccctcgtctttctgaacgcacttatgcccgatatcgatcacagtccagcgttcgtgtataagaaatatagcgaagttttcactgactggaaagattcgatcttcagcaattatacctacggtaacgacacggttactgcgattgaattgggagatcgtactctggccgagaacatcttctccaattctccgattgaagatgtagaactggcgaaacatcgtgtccgcaaaggctccttttttctgcaagacttggataccctgccgaactttacgtcggaagggtatggttcaattcgtcgtgtgtatgtttacggcgaagaagaccagtgctttagccgcgattttcagttatggcaaattaataattataagcctgataaagtgtactgtgtaccgagtgctgaccacaagattatgatcagccgcgtcaacgagctggcccagattctccaagaagttgcaaactctgcgagtgatcttcttgcagtggct

SEQ ID NO: 1350 - protein, 263 aa, synthetic construct
  REGION 1..263: note = Round 5 (Selectivity)
MVSAHFILIHSVCHGAWLWYKLIPLLQSAGHNVTAIDLWASGSNPRQLEQIGTWEQYSEPLFTLIESIPEGKKVILVGESGGGINIALAAEKYPEKVSALVFLNALMPDIDHSPAFVYKKYSEVFTDWKDSIFSNYTYGNDTVTAIELGDRTLAENIFSNSPIEDVELAKHRVRKGSFFLQDLDTLPNFTSEGYGSIRRVYVYGEEDQCFSRDFQLWQINNYKPDKVYCVPSADHKIMISRVNELAQILQEVANSASDLLAVA

SEQ ID NO: 1351 - DNA, 789 bp, synthetic construct
  misc_feature 1..789: note = Round 5 (Selectivity)
  source 1..789: mol_type = other DNA
atggttagtgcgcattttattctgatccacagtgtttgccatggcgcctggctgtggtataaactgatcccgttattacagtctgcaggtcataacgttacggcgattgatctttgggctagcgggagtaatcctcgccaactggaacagattggcacatgggagcagtactcagaaccattgttcaccctgatcgaatcgattccggaaggtaagaaagtcattctggtaggagaatccggtggcggcatcaatattgcactggccgcggagaaatatccggagaaagtgagcgccctcgtctttgtgaacgcacttatgcccgatatcgatcacagtccagcgttcgtgtataagaaatatagcgaagttttcactgactggaaagattcgatcttcagcaattatacctacggtaacgacacggttaccgcggtggaattgggagatcgtactctggccgagaacatcttctccaattctccgattgaagatgtagaactggcgaaacattgcgtccgcaaaggctccttttttgtgcaagacttggataccctgccgaactttacgtcggaagggtatggttcaattcgtcgtgtgtatgtttacggcgaagaagaccagtgctttagccgcgattttcagttatggcaaattaataattataagcctgataaagtgtactgtgtaccgagtgctgaccacaagattatgatcagccgcgtcaacgagctggcccagattctccaagaagttgcaaactctgcgagtgatcttcttgcagtggct

SEQ ID NO: 1352 - protein, 263 aa, synthetic construct
  REGION 1..263: note = Round 5 (Selectivity)
MVSAHFILIHSVCHGAWLWYKLIPLLQSAGHNVTAIDLWASGSNPRQLEQIGTWEQYSEPLFTLIESIPEGKKVILVGESGGGINIALAAEKYPEKVSALVFVNALMPDIDHSPAFVYKKYSEVFTDWKDSIFSNYTYGNDTVTAVELGDRTLAENIFSNSPIEDVELAKHCVRKGSFFVQDLDTLPNFTSEGYGSIRRVYVYGEEDQCFSRDFQLWQINNYKPDKVYCVPSADHKIMISRVNELAQILQEVANSASDLLAVA

SEQ ID NO: 1353 - DNA, 789 bp, synthetic construct
  misc_feature 1..789: note = Round 5 (Selectivity)
  source 1..789: mol_type = other DNA
atggttagtgcgcattttattctgatccacagtgtttgccatggcgcctggctgtggtataaactgatcccgttattacagtctgcaggtcataacgttacggcgattgatctttgggctagcgggagtaatcctcgccaactggaacagattggcacatgggagcagtactcagaaccattgttcaccctgatcgaatcgattccggaaggtaagaaagtcattctggtaggagaatccggtggcggcatcaatattgcactggccgcggagaaatatccggagaaagtgagcgccctcgtctttgtgaacgcacttatgcccgatatcgatcacagtccagcgttcgtggtccataaatatagcgaagttttcactgactggaaagattcgatcttcagcaattatacctacggtaacgacacggttactgcggttgaattgggagatcgtactctggccgagaacatcttctccaattctccgattgaagatgtagaactggcgaaacattgcgtccgcaaaggctccttttttctgcaagacttggataccctgccgaactttacgtcggaagggtatggttcaattcgtcgtgtgtatgtttacggcgaagaagaccagtgctttagccgcgattttcagttatggcaaattaataattataagcctgataaagtgtactgtgtaccgagtgctgaccacaagattatgatcagccgcgtcaacgagctggcccagattctccaagaagttgcaaactctgcgagtgatcttcttgcagtggct

SEQ ID NO: 1354 - protein, 263 aa, synthetic construct
  REGION 1..263: note = Round 5 (Selectivity)
MVSAHFILIHSVCHGAWLWYKLIPLLQSAGHNVTAIDLWASGSNPRQLEQIGTWEQYSEPLFTLIESIPEGKKVILVGESGGGINIALAAEKYPEKVSALVFVNALMPDIDHSPAFVVHKYSEVFTDWKDSIFSNYTYGNDTVTAVELGDRTLAENIFSNSPIEDVELAKHCVRKGSFFLQDLDTLPNFTSEGYGSIRRVYVYGEEDQCFSRDFQLWQINNYKPDKVYCVPSADHKIMISRVNELAQILQEVANSASDLLAVA

SEQ ID NO: 1355 - DNA, 789 bp, synthetic construct
  misc_feature 1..789: note = Round 5 (Selectivity)
  source 1..789: mol_type = other DNA
atggttagtgcgcattttattctgatccacagtgtttgccatggcgcctggctgtggtataaactgatcccgttattacagtctgcaggtcataacgttacggcgattgatctttgggctagcgggagtaatcctcgccaactggaacagattggcacatgggagcagtactcagaaccattgttcaccctgatcgaatcgattccggaaggtaagaaagtcattctggtaggagaatccggtggcggcatcaatattgcactggccgcggagaaatatccggagaaagtgagcgccctcgtctttgtgaacgcacttatgcccgatatcgatcacagtccagcgttcgtgtataagaaatatagcgaagttttcactgactggaaagattcgatcttcagcaattatacctacggtaacgacacggttgtagcggttgaattgggagatcgtactctggccgagaacatcttctccaattctccgattgaagatgtagaactggcgaaacatcgtgtccgcaaaggctccttttttctgcaagacttggataccctgccgaactttacgtcggaagggtatggttcaattcgtcgtgtgtatgtttacggcgaagaagaccagtgctttagccgcgattttcagttatggcaaattaataattataagcctgataaagtgtactgtgtaccgggtgctgaccacaagattatgatcagccgcgtcaacgagctggcccagattctccaagaagttgcaaactctgcgagtgatcttcttgcagtggct

SEQ ID NO: 1356 - protein, 263 aa, synthetic construct
  REGION 1..263: note = Round 5 (Selectivity)
MVSAHFILIHSVCHGAWLWYKLIPLLQSAGHNVTAIDLWASGSNPRQLEQIGTWEQYSEPLFTLIESIPEGKKVILVGESGGGINIALAAEKYPEKVSALVFVNALMPDIDHSPAFVYKKYSEVFTDWKDSIFSNYTYGNDTVVAVELGDRTLAENIFSNSPIEDVELAKHRVRKGSFFLQDLDTLPNFTSEGYGSIRRVYVYGEEDQCFSRDFQLWQINNYKPDKVYCVPGADHKIMISRVNELAQILQEVANSASDLLAVA

SEQ ID NO: 1357 - DNA, 789 bp, synthetic construct
  misc_feature 1..789: note = Round 5 (Selectivity)
  source 1..789: mol_type = other DNA
atggttagtgcgcattttattctgatccacagtgtttgccatggcgcctggctgtggtataaactgatcccgttattacagtctgcaggtcataacgttacggcgattgatctttgggctagcgggagtaatcctcgccaactggaacagattggcacatgggagcagtactcagaaccattgttcaccctgatcgaatcgattccggaaggtaagaaagtcattctggtaggagaatccggtggcggcatcaatattgcactggccgcggagaaatatccggagaaagtgagcgccctcgtctttctgaacgcacttatgcccgatatcgatcacagtccagcgttcgtgtataagaaatatagcgaagttttcactgactggaaagattcgatcttcagcaattatacctacggtaacgacacggttaccgcggtggaattgggagatcgtactctggccgagaacatcttctccaattctccgattgaagatgtagaactggcgaaacattgcgtccgcaaaggctccttttttctgcaagacttggataccctgccgaactttacgtcggaagggtatggttcaattcgtcgtgtgtatgtttacggcgaagaagaccagtgctttagccgcgattttcagttatggcaaattaataattataagcctgataaagtgtactgtgtaccgagtgctgaccacaagattatgatcagccgcgtcaacgagctggcccagattctccaagaagttgcaaactctgcgagtgatcttcttgcagtggct

SEQ ID NO: 1358 - protein, 263 aa, synthetic construct
  REGION 1..263: note = Round 5 (Selectivity)
MVSAHFILIHSVCHGAWLWYKLIPLLQSAGHNVTAIDLWASGSNPRQLEQIGTWEQYSEPLFTLIESIPEGKKVILVGESGGGINIALAAEKYPEKVSALVFLNALMPDIDHSPAFVYKKYSEVFTDWKDSIFSNYTYGNDTVTAVELGDRTLAENIFSNSPIEDVELAKHCVRKGSFFLQDLDTLPNFTSEGYGSIRRVYVYGEEDQCFSRDFQLWQINNYKPDKVYCVPSADHKIMISRVNELAQILQEVANSASDLLAVA

SEQ ID NO: 1359 - DNA, 789 bp, synthetic construct
  misc_feature 1..789: note = Round 5 (Selectivity)
  source 1..789: mol_type = other DNA
atggttagtgcgcattttattctgatccacagtgtttgccatggcgcctggctgtggtataaactgatcccgttattacagtctgcaggtcataacgttacggcgattgatctttgggctagcgggagtaatcctcgccaactggaacagattggcacatgggagcagtactcagaaccattgttcaccctgatcgaatcgattccggaaggtaagaaagtcattctggtaggagaatccggtggcggcatcaatattgcactggccgcggagaaatatccggagaaagtgagcgccctcgtctttgtgaacgcacttatgcccgatatcgatcacagtccagcgttcgtgtataagaaatatagcgaagttttcactgactggaaagattcgatcttcagcgtttatacctacggtaacgacacggttaccgcggtggaattgggagatcgtactctggccgagaacatcttctccaattctccgattgaagatgtagaactggcgaaacatcgtgtccgcaaaggctccttttttctgcaagacttggataccctgccgaactttacgtcggaagggtatggttcaattcgtcgtgtgtatgtttacggcgaagaagaccagatctttagccgcgattttcagttatggcaaattaataattataagcctgataaagtgtactgtgtaccgagtgctgaccacaagattatgatcagccgcgtcaacgagctggcccagattctccaagaagttgcaaactctgcgagtgatcttcttgcagtggct

SEQ ID NO: 1360 - protein, 263 aa, synthetic construct
  REGION 1..263: note = Round 5 (Selectivity)
MVSAHFILIHSVCHGAWLWYKLIPLLQSAGHNVTAIDLWASGSNPRQLEQIGTWEQYSEPLFTLIESIPEGKKVILVGESGGGINIALAAEKYPEKVSALVFVNALMPDIDHSPAFVYKKYSEVFTDWKDSIFSVYTYGNDTVTAVELGDRTLAENIFSNSPIEDVELAKHRVRKGSFFLQDLDTLPNFTSEGYGSIRRVYVYGEEDQIFSRDFQLWQINNYKPDKVYCVPSADHKIMISRVNELAQILQEVANSASDLLAVA

SEQ ID NO: 1361 - DNA, 789 bp, synthetic construct
  misc_feature 1..789: note = Round 5 (Selectivity)
  source 1..789: mol_type = other DNA
atggttagtgcgcattttattctgatccacagtgtttgccatggcgcctggctgtggtataaactgatcccgttattacagtctgcaggtcataacgttacggcgattgatctttgggctagcgggagtaatcctcgccaactggaacagattggcacatgggagcagtactcagaaccattgttcaccctgatcgaatcgattccggaaggtaagaaagtcattctggtaggagaatccggtggcggcatcaatattgcactggccgcggagaaatatccggagaaagtgagcgccctcgtctttgtgaacgcacttatgcccgatatcgatcacagtccagcgttcgtgtataagaaatatagcgaagttttcactgactggaaagattcgatcttcagcaattatacctacggtaacgacacggttaccgcggtggaattgggagatcgtactctggccgagaacatcttctccaattctccgattgaagatgtagaactggcgaaacatcgtgtccgcaaaggctccttttttctgagtgacttggataccctgccgaactttacgtcggaagggtatggttcaattcgtcgtgtgtatgtttacggcgaagaagaccagatctttagccgcgattttcagttatggcaaattaataattataagcctgataaagtgtactgtgtaccgagtgctgaccacaagattatgatcagccgcgtcaacgagctggcccagattctccaagaagttgcaaactctgcgagtgatcttcttgcagtggct

SEQ ID NO: 1362 - protein, 263 aa, synthetic construct
  REGION 1..263: note = Round 5 (Selectivity)
MVSAHFILIHSVCHGAWLWYKLIPLLQSAGHNVTAIDLWASGSNPRQLEQIGTWEQYSEPLFTLIESIPEGKKVILVGESGGGINIALAAEKYPEKVSALVFVNALMPDIDHSPAFVYKKYSEVFTDWKDSIFSNYTYGNDTVTAVELGDRTLAENIFSNSPIEDVELAKHRVRKGSFFLSDLDTLPNFTSEGYGSIRRVYVYGEEDQIFSRDFQLWQINNYKPDKVYCVPSADHKIMISRVNELAQILQEVANSASDLLAVA

SEQ ID NO: 1363 - DNA, 789 bp, synthetic construct; identical to SEQ ID NO: 1315
  misc_feature 1..789: note = Round 5 (Selectivity)
  source 1..789: mol_type = other DNA

SEQ ID NO: 1364 - protein, 263 aa, synthetic construct; identical to SEQ ID NO: 1316
  REGION 1..263: note = Round 5 (Selectivity)

SEQ ID NO: 1365 - DNA, 789 bp, synthetic construct
  misc_feature 1..789: note = Round 5 (Selectivity)
  source 1..789: mol_type = other DNA
atggttagtgcgcattttattctgatccacagtgtttgccatggcgcctggctgtggtataaactgatcccgttattacagtctgcaggtcataacgttacggcgattgatctttgggctagcgggagtaatcctcgccaactggaacagattggcacatgggagcagtactcagaaccattgttcaccctgatcgaatcgattccggaaggtaagagggtcattctggtaggagaatccggtggcggcatcaatattgcactggccgcggagaaatatccggagaaagtgagcgccctcgtctttgtgaacgcacttatgcccgatatcgatcacagtccagcgttcgtgtataagaaatatagcgaagttttcactgactggaaagattcgatcttcagcaattatacctacggtaacgacacggttaccgcggtggaattgggagatcgtactctggccgagaacatcttctccaattctccgattgaagatgtagaactggcgaaacatcgtgtccgcaaaggctccttttttctgcaagacttggataccctgccgaactttacgtcggaagggtatggttcaattcgtcgtgtgtatgtttacggcgaagaagaccagatctttagccgcgattttcagttatggcaaattaataattataagcctgataaagtgtactgtgtaccgagtgctgaccacaagattatgatcagccgcgtcaacgagctggcccagattctccaagaagttgcaaactctgcgagtgatcttcttgcagtggct

SEQ ID NO: 1366 - protein, 263 aa, synthetic construct; identical to SEQ ID NO: 1292
  REGION 1..263: note = Round 5 (Selectivity)

SEQ ID NO: 1367 - DNA, 789 bp, synthetic construct
  misc_feature 1..789: note = Round 6 (Activity)
  source 1..789: mol_type = other DNA
atggttagtgcgcattttattctgatccacagtgtttgccatggcgcctggctgtggtataaactgatcccgttattacagtctgcaggtcataacgttacggcgattgatctttctgctagcgggagtaatcctcgccaactggaacagattggcacatgggagcagtactcagaaccattgttcaccctgatcgaatcgattccggaaggtaagaaagtcattctggtaggagaagcgggtggcggcatcaatattgcactggccgcggagaaatatccggagaaagtgagcgccctcgtctttgtgaacgcacttatgcccgatatcgatcacagtccagcgttcgtgtataagaaatatagcgaagttttcactgactggaaagattcgatcttcagcaattatacctacggtaacgacacggttaccgcggtggaattgggagatcgtactctggccgagaacatcttctccaattctccgattgaagatgtagaactggcgaaacatcgtgtccgcaaaggctccttttttctgcaagacttggataccctgccgaactttacgtcggaagggtatggttcaattcgtcgtgtgtatgtttacggcgaagaagaccagatctttagccgcgattttcagttatggcaaattaataattataagcctgataaagtgtactgtgtaccgagtgctgaccacaagattatgatcagccgcgtcaacgagctggcccagattctccaagaagttgcaaactctgcgagtgatcttcttgcagtggct

SEQ ID NO: 1368 - protein, 263 aa, synthetic construct
  REGION 1..263: note = Round 6 (Activity)
MVSAHFILIHSVCHGAWLWYKLIPLLQSAGHNVTAIDLSASGSNPRQLEQIGTWEQYSEPLFTLIESIPEGKKVILVGEAGGGINIALAAEKYPEKVSALVFVNALMPDIDHSPAFVYKKYSEVFTDWKDSIFSNYTYGNDTVTAVELGDRTLAENIFSNSPIEDVELAKHRVRKGSFFLQDLDTLPNFTSEGYGSIRRVYVYGEEDQIFSRDFQLWQINNYKPDKVYCVPSADHKIMISRVNELAQILQEVANSASDLLAVA

SEQ ID NO: 1369 - DNA, 789 bp, synthetic construct
  misc_feature 1..789: note = Round 6 (Activity)
  source 1..789: mol_type = other DNA
atggttagtgcgcattttattctgatccacagtgtttgccatggcgcctggctgtggtataaactgatcccgttattacagtctgcaggtcataacgttacggcgattgatcttacggctagcgggagtaatcctcgccaactggaacagattggcacatgggagcagtactcagaaccattgttcaccctgatcgaatcgattccggaaggtaagaaagtcattctggtaggagaagcgggtggcggcatcaatattgcactggccgcggagaaatatccggagaaagtgagcgccctcgtctttgtgaacgcacttatgcccgatatcgatcacagtccagcgttcgtgtataagaaatatagcgaagttttcactgactggaaagattcgatcttcagcaattatacctacggtaacgacacggttaccgcggtggaattgggagatcgtactctggccgagaacatcttctccaattctccgattgaagatgtagaactggcgaaacatcgtgtccgcaaaggctccttttttctgcaagacttggataccctgccgaactttacgtcggaagggtatggttcaattcgtcgtgtgtatgtttacggcgaagaagaccagatctttagccgcgattttcagttatggcaaattaataattataagcctgataaagtgtactgtgtaccgagtgctgaccacaagattatgatcagccgcgtcaacgagctggcccagattctccaagaagttgcaaactctgcgagtgatcttcttgcagtggct

SEQ ID NO: 1370 - protein, 263 aa, synthetic construct
  REGION 1..263: note = Round 6 (Activity)
MVSAHFILIHSVCHGAWLWYKLIPLLQSAGHNVTAIDLTASGSNPRQLEQIGTWEQYSEPLFTLIESIPEGKKVILVGEAGGGINIALAAEKYPEKVSALVFVNALMPDIDHSPAFVYKKYSEVFTDWKDSIFSNYTYGNDTVTAVELGDRTLAENIFSNSPIEDVELAKHRVRKGSFFLQDLDTLPNFTSEGYGSIRRVYVYGEEDQIFSRDFQLWQINNYKPDKVYCVPSADHKIMISRVNELAQILQEVANSASDLLAVA

SEQ ID NO: 1371 - DNA, 789 bp, synthetic construct
  misc_feature 1..789: note = Round 6 (Selectivity)
  source 1..789: mol_type = other DNA
atggttagtgcgcattttattctgatccacagtgtttgccatggcgcctggctgtggtataaactgatcccgttattacagtctgcaggtcataacgttacggcgattgatctttgggctagcgggagtaatcctcaccaactggaacagattggcacatggcgccagtactcagaaccattgttcaccctgatcgaatcgattccggaaggtaagaaagtcattctggtaggagaagcgggtggcggcatcaatattgcactggccgcggagaagtatccggagaaagtgagcgccctcgtctttgtgaacgcacttatgcccgatatcgatcacagtccagcgttcgtgtataagaaatatagcgaagttttcactgactggaaagattcgatcttcagcaattatacctacggtaacgacacggttaccgcggtggaattgggagatcgtactctggccgagaacatcttctccaattctccgattgaagatgtagaactggcgaaacatcgtgtccgcaaaggctccttttttctgcaagacttggataccctgccgaactttacgtcggaagggtatggttcaattcgtcgtgtgtatgtttacggcgaagaagaccagatctttagccgcgattttcagttatggcaaattaataattataagcctgataaagtgtactgtgtaccgagtgctgaccacaagattatgatcagccgcgtcaacgagctggcccagattctccaagaagttgcaaactctgcgagcgatcttcttgcggtgctg

SEQ ID NO: 1372 - protein, 263 aa, synthetic construct
  REGION 1..263: note = Round 6 (Selectivity)
MVSAHFILIHSVCHGAWLWYKLIPLLQSAGHNVTAIDLWASGSNPHQLEQIGTWRQYSEPLFTLIESIPEGKKVILVGEAGGGINIALAAEKYPEKVSALVFVNALMPDIDHSPAFVYKKYSEVFTDWKDSIFSNYTYGNDTVTAVELGDRTLAENIFSNSPIEDVELAKHRVRKGSFFLQDLDTLPNFTSEGYGSIRRVYVYGEEDQIFSRDFQLWQINNYKPDKVYCVPSADHKIMISRVNELAQILQEVANSASDLLAVL

SEQ ID NO: 1373 - DNA, 789 bp, synthetic construct
  misc_feature 1..789: note = Round 6 (Selectivity)
  source 1..789: mol_type = other DNA
atggtttcggcgcattttatcctgatccacagtgtttgccatggcgcctggctgtggtataaactgatcccgttattacagtctgcaggtcataacgttacggcgattgatctttgggctagcgggagtaatcctcaccaactggaacagattggcacatgggagcagtactcagaaccattgttcaccctgatcgaatcgattccgaacggtaagaaagtcattctggtaggagaagcgggtggcggcatcaatattgcactggccgcggagaagtatccggagaaagtgagcgccctcgtctttgtgaacgcacttatgcccgatatcgatcacagtccagcgttcgtgtacaagaaatatagcgaagttttcactgactggaaagattcgatcttcagcaattatacctacggtaacgacacggttaccgcggtggaattgggagatcgtactctggccgagaacatcttctccaattctccgattgaagatgtagaactggcgaaacatcgtgtccgcccgggctccttttttctgcaagacttggataccctgccgaactttacgtcggaagggtatggttcaattcgtcgtgtgtatgtctacggcgaagaagaccagatctttagccgcgattttcagttatggcaaattaataattataagcctgataaagtgtactgtgtaccgagtgctgaccacaagattatgatcagccgcgtcaacgagctggcccagattctccaagaagttgcaaactctgcgagcgatcttcttgcggtgggt

SEQ ID NO: 1374 - protein, 263 aa, synthetic construct
  REGION 1..263: note = Round 6 (Selectivity)
MVSAHFILIHSVCHGAWLWYKLIPLLQSAGHNVTAIDLWASGSNPHQLEQIGTWEQYSEPLFTLIESIPNGKKVILVGEAGGGINIALAAEKYPEKVSALVFVNALMPDIDHSPAFVYKKYSEVFTDWKDSIFSNYTYGNDTVTAVELGDRTLAENIFSNSPIEDVELAKHRVRPGSFFLQDLDTLPNFTSEGYGSIRRVYVYGEEDQIFSRDFQLWQINNYKPDKVYCVPSADHKIMISRVNELAQILQEVANSASDLLAVG

SEQ ID NO: 1375 - DNA, 789 bp, synthetic construct
  misc_feature 1..789: note = Round 6 (Selectivity)
  source 1..789: mol_type = other DNA
atggttagtgcgcattttattctgatccacagtgtttgccatggcgcctggctgtggtataaactgatcccgttattacagtctgcaggtcataacgttacggcgattgatctttgggctagcgggagtaatcctcaccaactggaacagattggcacatggcgccagtactcagaaccattgttcaccctgatcgaatcgattccggaaggtaagaaagtcattctggtaggagaagcgggtggcggcatcaatattgcactggccgcggagaagtatccggagaaagtgagcgccctcgtctttgtgaacgcacttatgcccgatatcgatcacagtccagcgttcgtggtaaagaaatatagcgaagttttcactgactggaaagattcgatcttcagcaattatacctacggtaacgacacggttaccgcggtggaattgggagatcgtactctggccgagaacatcttctccaattctccgattgaagatgtagaactggcgaaacatcgtgtccgcaaaggctccttttttctgcaagacttggataccctgccgaactttacgtcggaagggtatggttcaattcgtcgtgtgtatgtttacggcgaagaagaccagatctttagccgcgattttcagttatggcaaattaataattataagcctgataaagtgtactgtgtaccgagtgctgaccacaagattatgatcagccgcgtcaacgagctggcccagattctccaagaagttgcaaactctgcgagtgatcttcttgcggtggcg

SEQ ID NO: 1376 - protein, 263 aa, synthetic construct
  REGION 1..263: note = Round 6 (Selectivity)
MVSAHFILIHSVCHGAWLWYKLIPLLQSAGHNVTAIDLWASGSNPHQLEQIGTWRQYSEPLFTLIESIPEGKKVILVGEAGGGINIALAAEKYPEKVSALVFVNALMPDIDHSPAFVVKKYSEVFTDWKDSIFSNYTYGNDTVTAVELGDRTLAENIFSNSPIEDVELAKHRVRKGSFFLQDLDTLPNFTSEGYGSIRRVYVYGEEDQIFSRDFQLWQINNYKPDKVYCVPSADHKIMISRVNELAQILQEVANSASDLLAVA

SEQ ID NO: 1377 - DNA, 789 bp, synthetic construct
  misc_feature 1..789: note = Round 6 (Activity)
  source 1..789: mol_type = other DNA
atggttagtgcgcattttattctgatccacagtgtttgccatggcgcctggctgtggtataaactgatcccgttattacagtctgcaggtcataacgttacggcgattgatctttgggctagcgggagtaatcctcgccaactggaacagattggcacatgggagcagtactcagaaccattgttcaccctgatcgaatcgattccggaaggtaagaaagtcattctggtaggagaagcgggtggcggcatcaatattgcactggccgcggagaaatatccggagaaagtgagcgccctcgtctttgtgaacggtcttatgcccgatatcgatcacagtccagcgttcgtgtataagaaatatagcgaagttttcactgactggaaagattcgatcttcagcaattatacctacggtaacgacacggttaccgcggtggaattgggagatcgtactctggccgagaacatcttctccaattctccgattgaagatgtagaactggcgaaacatcgtgtccgcaaaggctccttttttctgcaagacttggataccctgccgaactttacgtcggaagggtatggttcaattcgtcgtgtgtatgtttacggcgaagaagaccagatctttagccgcgattttcagttatggcaaattaataattataagcctgataaagtgtactgtgtaccgagtgctgaccacaagattatgatcagccgcgtcaacgagctggcccagattctccaagaagttgcaaactctgcgagtgatcttcttgcagtggct

SEQ ID NO: 1378 - protein, 263 aa, synthetic construct
  REGION 1..263: note = Round 6 (Activity)
MVSAHFILIHSVCHGAWLWYKLIPLLQSAGHNVTAIDLWASGSNPRQLEQIGTWEQYSEPLFTLIESIPEGKKVILVGEAGGGINIALAAEKYPEKVSALVFVNGLMPDIDHSPAFVYKKYSEVFTDWKDSIFSNYTYGNDTVTAVELGDRTLAENIFSNSPIEDVELAKHRVRKGSFFLQDLDTLPNFTSEGYGSIRRVYVYGEEDQIFSRDFQLWQINNYKPDKVYCVPSADHKIMISRVNELAQILQEVANSASDLLAVA

SEQ ID NO: 1379 - DNA, 789 bp, synthetic construct
  misc_feature 1..789: note = Round 6 (Selectivity)
  source 1..789: mol_type = other DNA
atggttagtgcgcattttattctgatccacagtgtttgccatggcgcctggctgtggtataaactgatcccgttattacagtctgcaggtcataacgttacggcgattgatcttgttgctagcgggagtaatcctcgccaactggaacagattggcacatgggagcagtactcagaaccattgttcaccctgatcgaatcgattccggaaggtaagaaagtcattctggtaggagaagcgggtggcggcatcaatattgcactggccgcggagaaatatccggagaaagtgagcgccctcgtctttgtgaacgcacttatgcccgatatcgatcacagtccagcgttcgtgtataagaaatatagcgaagttttcactgactggaaagattcgatcttcagcaattatacctacggtaacgacacggttaccgcggtggaattgggagatcgtactctggccgagaacatcttctccaattctccgattgaagatgtagaactggcgaaacatcgtgtccgcaaaggctccttttttctgcaagacttggataccctgccgaactttacgtcggaagggtatggttcaattcgtcgtgtgtatgtttacggcgaagaagaccagatctttagccgcgattttcagttatggcaaattaataattataagcctgataaagtgtactgtgtaccgagtgctgaccacaagattatgatcagccgcgtcaacgagctggcccagattctccaagaagttgcaaactctgcgagtgatcttcttgcagtggct

SEQ ID NO: 1380 - protein, 263 aa, synthetic construct
  REGION 1..263: note = Round 6 (Selectivity)
MVSAHFILIHSVCHGAWLWYKLIPLLQSAGHNVTAIDLVASGSNPRQLEQIGTWEQYSEPLFTLIESIPEGKKVILVGEAGGGINIALAAEKYPEKVSALVFVNALMPDIDHSPAFVYKKYSEVFTDWKDSIFSNYTYGNDTVTAVELGDRTLAENIFSNSPIEDVELAKHRVRKGSFFLQDLDTLPNFTSEGYGSIRRVYVYGEEDQIFSRDFQLWQINNYKPDKVYCVPSADHKIMISRVNELAQILQEVANSASDLLAVA

SEQ ID NO: 1381 - DNA, 789 bp, synthetic construct
  misc_feature 1..789: note = Round 6 (Selectivity)
  source 1..789: mol_type = other DNA
atggttagtgcgcattttattctgatccacagtgtttgccatggcgcctggctgtggtataaactgatcccgttattacagtctgcaggtcataacgttacggcgattgatctttgggctagcgggagtaatcctcgccaactggaacagattggcacatgggagcagtactcagaaccattgttcaccctgatcgaatcgattccggaaggtaagaaagtcattctggtaggagaagcgggtggcggcatcaatattgcactggccgcggagaaatatccggagaaagtgagcgccctcgtctttgtgaacgcacttatgcccgatatcgatcacagtccagcgttcgtggtaaagaaatatagcgaagttttcactgactggaaagattcgatcttcagcaattatacctacggtaacgacacggttaccgcggtggaattgggagatcgtactctggccgagaacatcttctccaattctccgattgaagatgtagaactggcgaaacatcgtgtccgcaaaggctccttttttctgcaagacttggataccctgccgaactttacgtcggaagggtatggttcaattcgtcgtgtgtatgtttacggcgaagaagaccagatctttagccgcgattttcagttatggcaaattaataattataagcctgatgtggtgtactgtgtaccgagtgctgaccacaagattatgatcagccgcgtcaacgagctggcccagattctccaagaagttgcaaactctgcgagcgatcttcttggggtgatc

SEQ ID NO: 1382 - protein, 263 aa, synthetic construct
  REGION 1..263: note = Round 6 (Selectivity)
MVSAHFILIHSVCHGAWLWYKLIPLLQSAGHNVTAIDLWASGSNPRQLEQIGTWEQYSEPLFTLIESIPEGKKVILVGEAGGGINIALAAEKYPEKVSALVFVNALMPDIDHSPAFVVKKYSEVFTDWKDSIFSNYTYGNDTVTAVELGDRTLAENIFSNSPIEDVELAKHRVRKGSFFLQDLDTLPNFTSEGYGSIRRVYVYGEEDQIFSRDFQLWQINNYKPDVVYCVPSADHKIMISRVNELAQILQEVANSASDLLGVI

SEQ ID NO: 1383 - DNA, 789 bp, synthetic construct
  misc_feature 1..789: note = Round 6 (Selectivity)
  source 1..789: mol_type = other DNA
atggttagtgcgcattttattctgatccacagtgtttgccatggcgcctggctgtggtataaactgatcccgttattacagtctgcaggtcataacgttacggcgattgatctttgggctagcgggagtaatcctcaccaactggaacagattggcacatgggagcagtactcagaaccattgttcaccctgatcgaatcgattccggaaggtaagaaagtcattctggtaggagaagcgggtggcggcatcaatattgcactggccgcggagaaatatccggagaaagtgagcgccctcgtctttgtgaacgcacttatgcccgatatcgatcacagtccagcgttcgtggtaaagaaatatagcgaagttttcactgactggaaagattcgatcttcagcaattatacctacggtaacgacacggttaccgcggtggaattgggagatcgtactctggccgagaacatcttctccaattctccgattgaagatgtagaactggcgaaacatcgtgtccgcaaaggctccttttttctgcaagacttggataccctgccgaactttacgtcggaagggtatggttcaattcgtcgtgtgtatgtttacggcgaagaagaccagatctttagccgcgattttcagttatggcaaattaataattataagcctgataaagtgtactgtgtaccgagtgctgaccacaagattatgatcagccgcgtcaacgagctggcccagattctccaagaagttgcaaactctgcgagtgatcttcttgcagtggct

SEQ ID NO: 1384 - protein, 263 aa, synthetic construct
  REGION 1..263: note = Round 6 (Selectivity)
MVSAHFILIHSVCHGAWLWYKLIPLLQSAGHNVTAIDLWASGSNPHQLEQIGTWEQYSEPLFTLIESIPEGKKVILVGEAGGGINIALAAEKYPEKVSALVFVNALMPDIDHSPAFVVKKYSEVFTDWKDSIFSNYTYGNDTVTAVELGDRTLAENIFSNSPIEDVELAKHRVRKGSFFLQDLDTLPNFTSEGYGSIRRVYVYGEEDQIFSRDFQLWQINNYKPDKVYCVPSADHKIMISRVNELAQILQEVANSASDLLAVA

SEQ ID NO: 1385 - DNA, 789 bp, synthetic construct
  misc_feature 1..789: note = Round 6 (Selectivity)
  source 1..789: mol_type = other DNA
atggttagtgcgcattttattctgatccacagtgtttgccatggcgcctggctgtggtataaactgatcccgttattacagtctgcaggtcataacgttacggcgattgatcttcaggctagcgggagtaatcctcgccaactggaacagattggcacatgggagcagtactcagaaccattgttcaccctgatcgaatcgattccggaaggtaagaaagtcattctggtaggagaagcgggtggcggcatcaatattgcactggccgcggagaaatatccggagaaagtgagcgccctcgtctttgtgaacgcacttatgcccgatatcgatcacagtccagcgttcgtgtataagaaatatagcgaagttttcactgactggaaagattcgatcttcagcaattatacctacggtaacgacacggttaccgcggtggaattgggagatcgtactctggccgagaacatcttctccaattctccgattgaagatgtagaactggcgaaacatcgtgtccgcaaaggctccttttttctgcaagacttggataccctgccgaactttacgtcggaagggtatggttcaattcgtcgtgtgtatgtttacggcgaagaagaccagatctttagccgcgattttcagttatggcaaattaataattataagcctgataaagtgtactgtgtaccgagtgctgaccacaagattatgatcagccgcgtcaacgagctggcccagattctccaagaagttgcaaactctgcgagtgatcttcttgcagtggct

SEQ ID NO: 1386 - protein, 263 aa, synthetic construct
  REGION 1..263: note = Round 6 (Selectivity)
MVSAHFILIHSVCHGAWLWYKLIPLLQSAGHNVTAIDLQASGSNPRQLEQIGTWEQYSEPLFTLIESIPEGKKVILVGEAGGGINIALAAEKYPEKVSALVFVNALMPDIDHSPAFVYKKYSEVFTDWKDSIFSNYTYGNDTVTAVELGDRTLAENIFSNSPIEDVELAKHRVRKGSFFLQDLDTLPNFTSEGYGSIRRVYVYGEEDQIFSRDFQLWQINNYKPDKVYCVPSADHKIMISRVNELAQILQEVANSASDLLAVA

SEQ ID NO: 1387 - DNA, 789 bp, synthetic construct
  misc_feature 1..789: note = Round 6 (Activity)
  source 1..789: mol_type = other DNA
atggttagtgcgcattttattctgatccacagtgtttgccatggcgcctggctgtggtataaactgatcccgttattacagtctgcaggtcataacgttacggcgattgatctttgggctagcgggagtaatcctcaccaactggaacagattggcacatggcgccagtactcagaaccattgttcaccctgatcgaatcgattccggaaggtaagaaagtcattctggtaggagaagcgggtggcggcatcaatattgcactggccgcggagaagtatccggagaaagtgagcgccctcgtctttgtgaacgcacttatgcccgatatcgatcacagtccagcgttcgtgtataagaaatatagcgaagttttcactgactggaaagattcgatcttcagcaattatacctacggtaacgacacggttaccgcggtcgaattgggagatcgtactctggccgagaacatcttctccaattctccgattgaagatgtagaactggcgaaacatcgtgtccgcaaaggctccttttttctgcaagacttggataccctgccgaactttacgtcggaagggtatggttcaattcgtcgtgtgtatgtttacggcgaagaagaccagatctttagccgcgattttcagttatggcaaattaataattataagcctgataaagtgtactgtgtaccgagtgctgaccacaagattatgatcagccgcgtcaacgagctggcccagattctccaagaagttgcaaactctgcgagtgatcttcttgcagtggct

SEQ ID NO: 1388 - protein, 263 aa, synthetic construct
  REGION 1..263: note = Round 6 (Activity)
MVSAHFILIHSVCHGAWLWYKLIPLLQSAGHNVTAIDLWASGSNPHQLEQIGTWRQYSEPLFTLIESIPEGKKVILVGEAGGGINIALAAEKYPEKVSALVFVNALMPDIDHSPAFVYKKYSEVFTDWKDSIFSNYTYGNDTVTAVELGDRTLAENIFSNSPIEDVELAKHRVRKGSFFLQDLDTLPNFTSEGYGSIRRVYVYGEEDQIFSRDFQLWQINNYKPDKVYCVPSADHKIMISRVNELAQILQEVANSASDLLAVA

SEQ ID NO: 1389 - DNA, 789 bp, synthetic construct
  misc_feature 1..789: note = Round 6 (Selectivity)
  source 1..789: mol_type = other DNA
atggttagtgcgcattttattctgatccacagtgtttgccatggcgcctggctgtggtataaactgatcccgttattacagtctgcaggtcataacgttacggcgattgatctttgggctagcgggagtaatcctcaccaactggaacagattggcacatggcgccagtactcagaaccattgttcaccctgatcgaatcgattccggaaggttgcaaagtcattctggtaggagaagcgggtggcggcatcaatattgcactggccgcggagaaatatccggagaaagtgagcgccctcgtctttgtgaacgcacttatgcccgatatcgatcacagtccagcgttcgtgtataagaaatatagcgaagttttcactgactggaaagattcgatcttcagcaattatacctacggtaacgacacggttaccgcggtggaattgggagatcgtactctggccgagaacatcttctccaattctccgattgaagatgtagaactggcgaaacatcgtgtccgcaaaggctccttttttctgcaagacttggataccctgccgaactttacgtcggaagggtatggttcaattcgtcgtgtgtatgtttacggcgaagaagaccagatctttagccgcgattttcagttatggcaaattaataattataagcctgataaagtgtactgtgtaccgagtgctgaccacaagattatgatcagccgcgtcaacgagctggcccagattctccaagaagttgcaaactctgcgagtgatcttcttgcagtggct

SEQ ID NO: 1390 - protein, 263 aa, synthetic construct
  REGION 1..263: note = Round 6 (Selectivity)
MVSAHFILIHSVCHGAWLWYKLIPLLQSAGHNVTAIDLWASGSNPHQLEQIGTWRQYSEPLFTLIESIPEGCKVILVGEAGGGINIALAAEKYPEKVSALVFVNALMPDIDHSPAFVYKKYSEVFTDWKDSIFSNYTYGNDTVTAVELGDRTLAENIFSNSPIEDVELAKHRVRKGSFFLQDLDTLPNFTSEGYGSIRRVYVYGEEDQIFSRDFQLWQINNYKPDKVYCVPSADHKIMISRVNELAQILQEVANSASDLLAVA

SEQ ID NO: 1391 - DNA, 789 bp, synthetic construct
  misc_feature 1..789: note = Round 6 (Selectivity)
  source 1..789: mol_type = other DNA
atggttagtgcgcattttattctgatccacagtgtttgccatggcgcctggctgtggtataaactgatcccgttattacagtctgcaggtcataacgttacggcgattgatctttgggctagcgggagtaatcctcgccaactggaacagattggcacatggcgccagtactcagaaccattgttcaccctgatcgaatcgattccggaaggtaagaaagtcattctggtaggagaagcgggtggcggcatcaatattgcactggccgcggagaagtatccggagaaagtgagcgccctcgtctttgtgaacgcacttatgcccgatatcgatcacagtccagcgttcgtgtataagaaatatagcgaagttttcactgactggaaagattcgatcttcagcaattatacctacggtaacgacacggttaccgcggtggaattgggagatcgtactctggccgagaacatcttctccaattctccgattgaagatgtagaactggcgaaacatcgtgtccgcaaaggctccttttttctgcaagacttggataccctgccgaactttacgtcggaagggtatggttcaattcgtcgtgtgtatgtttacggcgaagaagaccagatctttagccgcgattttcagttatggcaaattaataattataagcctgataaagtgtactgtgtaccgagtgctgaccacaagattatgatcagccgcgtcaacgagctggcccagattctccaagaagttgcaaactctgcgagcgatcttcttgcggtgggt

SEQ ID NO: 1392 - protein, 263 aa, synthetic construct
  REGION 1..263: note = Round 6 (Selectivity)
MVSAHFILIHSVCHGAWLWYKLIPLLQSAGHNVTAIDLWASGSNPRQLEQIGTWRQYSEPLFTLIESIPEGKKVILVGEAGGGINIALAAEKYPEKVSALVFVNALMPDIDHSPAFVYKKYSEVFTDWKDSIFSNYTYGNDTVTAVELGDRTLAENIFSNSPIEDVELAKHRVRKGSFFLQDLDTLPNFTSEGYGSIRRVYVYGEEDQIFSRDFQLWQINNYKPDKVYCVPSADHKIMISRVNELAQILQEVANSASDLLAVG

SEQ ID NO: 1393 - DNA, 789 bp, synthetic construct
  misc_feature 1..789: note = Round 6 (Activity)
  source 1..789: mol_type = other DNA
atggttagtgcgcattttattctgatccacagtgtttgccatggcgcctggctgtggtataaactgatcccgttattacagtctgcaggtcataacgttacggcgattgatctttgggctagcgggagtaatcctcaccaactggaacagattggcacatgggagcagtactcagaaccactgttcaccctgatcgaatcgattccggaaggttgcaaagtcattctggtaggagaagcgggtggcggcatcaatattgcactggccgcggagaagtatccggagaaagtgagcgccctcgtctttgtgaacgcacttatgcccgatatcgatcacagtccagcgttcgtgtacaagaaatatagcgaagttttcactgactggaaagattcgatcttcagcaattatacctacggtaacgacacggttaccgcggtcgaattgggagatcgtactctggccgagaacatcttctccaattctccgattgaagatgtagaactggcgaaacatcgtgtccgcaaaggctccttttttctgcaagacttggataccctgccgaactttacgtcggaagggtatggttcaattcgtcgtgtgtatgtttacggcgaagaagaccagatctttagccgcgattttcagttatggcaaattaataattataagcctgataaagtgtactgtgtaccgagtgctgaccacaagattatgatcagccgcgtcaacgagctggcccagattctccaagaagttgcaaactctgcgagtgatcttcttgcagtggct

SEQ ID NO: 1394 - protein, 263 aa, synthetic construct
  REGION 1..263: note = Round 6 (Activity)
MVSAHFILIHSVCHGAWLWYKLIPLLQSAGHNVTAIDLWASGSNPHQLEQIGTWEQYSEPLFTLIESIPEGCKVILVGEAGGGINIALAAEKYPEKVSALVFVNALMPDIDHSPAFVYKKYSEVFTDWKDSIFSNYTYGNDTVTAVELGDRTLAENIFSNSPIEDVELAKHRVRKGSFFLQDLDTLPNFTSEGYGSIRRVYVYGEEDQIFSRDFQLWQINNYKPDKVYCVPSADHKIMISRVNELAQILQEVANSASDLLAVA

SEQ ID NO: 1395 - DNA, 789 bp, synthetic construct
  misc_feature 1..789: note = Round 6 (Selectivity)
  source 1..789: mol_type = other DNA
atggttagtgcgcattttattctgatccacagtgtttgccatggcgcctggctgtggtataaactgatcccgttattacagtctgcaggtcataacgttacggcgattgatctttgggctagcgggagtaatcctcaccaactggaacagattggcacatggcgccagtactcagaaccattgttcaccctgatcgaatcgattccggaaggtaagaaagtcattctggtaggagaagcgggtggcggcatcaatattgcactggccgcggagaagtatccggagaaagtgagcgccctcgtctttgtgaacgcacttatgcccgatatcgatcacagtccagcgttcgtgtacaagaaatatagcgaagttttcactgactggaaagattcgatcttcagcaattatacctacggtaacgacacggttaccgcggtggaattgggagatcgtactctggccgagaacatcttctccaattctccgattgaagatgtagaactggcgaaacatcgtgtccgcaaaggctccttttttctgcaagacttggataccctgccgaactttacgtcggaagggtatggttcaattcgtcgtgtgtatgtttacggcgaagaagaccagatctttagccgcgattttcagttatggcaaattaataattataaacctgatgtggtgtactgtgtaccgagtgctgaccacaagattatgatcagccgcgtcaacgagctggcccagattctccaagaagttgcaaactctgcgcaagatcttcttgcggtgctg

SEQ ID NO: 1396 - protein, 263 aa, synthetic construct
  REGION 1..263: note = Round 6 (Selectivity)
MVSAHFILIHSVCHGAWLWYKLIPLLQSAGHNVTAIDLWASGSNPHQLEQIGTWRQYSEPLFTLIESIPEGKKVILVGEAGGGINIALAAEKYPEKVSALVFVNALMPDIDHSPAFVYKKYSEVFTDWKDSIFSNYTYGNDTVTAVELGDRTLAENIFSNSPIEDVELAKHRVRKGSFFLQDLDTLPNFTSEGYGSIRRVYVYGEEDQIFSRDFQLWQINNYKPDVVYCVPSADHKIMISRVNELAQILQEVANSAQDLLAVL

SEQ ID NO: 1397 - DNA, 789 bp, synthetic construct
  misc_feature 1..789: note = Round 6 (Activity)
  source 1..789: mol_type = other DNA
atggttagtgcgcattttattctgatccacagtgtttgccatggcgcctggctgtggtataaactgatcccgttattacagtctgcaggtcataacgttacggcgattgatctttttgctagcgggagtaatcctcgccaactggaacagattggcacatgggagcagtactcagaaccattgttcaccctgatcgaatcgattccggaaggtaagaaagtcattctggtaggagaagcgggtggcggcatcaatattgcactggccgcggagaaatatccggagaaagtgagcgccctcgtctttgtgaacgcacttatgcccgatatcgatcacagtccagcgttcgtgtataagaaatatagcgaagttttcactgactggaaagattcgatcttcagcaattatacctacggtaacgacacggttaccgcggtggaattgggagatcgtactctggccgagaacatcttctccaattctccgattgaagatgtagaactggcgaaacatcgtgtccgcaaaggctccttttttctgcaagacttggataccctgccgaactttacgtcggaagggtatggttcaattcgtcgtgtgtatgtttacggcgaagaagaccagatctttagccgcgattttcagttatggcaaattaataattataagcctgataaagtgtactgtgtaccgagtgctgaccacaagattatgatcagccgcgtcaacgagctggcccagattctccaagaagttgcaaactctgcgagtgatcttcttgcagtggct

SEQ ID NO: 1398 - protein, 263 aa, synthetic construct
  REGION 1..263: note = Round 6 (Activity)
MVSAHFILIHSVCHGAWLWYKLIPLLQSAGHNVTAIDLFASGSNPRQLEQIGTWEQYSEPLFTLIESIPEGKKVILVGEAGGGINIALAAEKYPEKVSALVFVNALMPDIDHSPAFVYKKYSEVFTDWKDSIFSNYTYGNDTVTAVELGDRTLAENIFSNSPIEDVELAKHRVRKGSFFLQDLDTLPNFTSEGYGSIRRVYVYGEEDQIFSRDFQLWQINNYKPDKVYCVPSADHKIMISRVNELAQILQEVANSASDLLAVA

SEQ ID NO: 1399 - DNA, 789 bp, synthetic construct
  misc_feature 1..789: note = Round 6 (Selectivity)
  source 1..789: mol_type = other DNA
atggttagtgcgcattttattctgatccacagtgtttgccatggcgcctggctgtggtataaactgatcccgttattacagtctgcaggtcataacgttacggcgattgatctttgggctagcgggagtaatcctcaccaactggaacagattggcacatgggagcagtactcagaaccattgttcaccctgatcgaatcgattccgaacggtaagaaagtcattctggtaggagaagcgggtggcggcatcaatattgcactggccgcggagaagtatccggagaaagtgagcgccctcgtctttgtgaacgcacttatgcccgatatcgatcacagtccagcgttcgtgtataagaaatatagcgaagttttcactgactggaaagattcgatcttcagcaattatacctacggtaacgacacggttaccgcggtggaattgggagatcgtactctggccgagaacatcttctccaattctccgattgaagatgtagaactggcgaaacatcgtgtccgcaaaggctccttttttctgcaagacttggataccctgccgaactttacgtcggaagggtatggttcaattcgtcgtgtgtatgtttacggcgaagaagaccagatctttagccgcgattttcagttatggcaaattaataattataagcctgataaagtgtactgtgtaccgagtgctgaccacaagattatgatcagccgcgtcaacgagctggcccagattctccaagaagttgcaaactctgcgagtgatcttcttgcagtggct

SEQ ID NO: 1400 - protein, 263 aa, synthetic construct
  REGION 1..263: note = Round 6 (Selectivity)
MVSAHFILIHSVCHGAWLWYKLIPLLQSAGHNVTAIDLWASGSNPHQLEQIGTWEQYSEPLFTLIESIPNGKKVILVGEAGGGINIALAAEKYPEKVSALVFVNALMPDIDHSPAFVYKKYSEVFTDWKDSIFSNYTYGNDTVTAVELGDRTLAENIFSNSPIEDVELAKHRVRKGSFFLQDLDTLPNFTSEGYGSIRRVYVYGEEDQIFSRDFQLWQINNYKPDKVYCVPSADHKIMISRVNELAQILQEVANSASDLLAVA

SEQ ID NO: 1401 - DNA, 789 bp, synthetic construct
  misc_feature 1..789: note = Round 6 (Selectivity)
  source 1..789: mol_type = other DNA
atgggtagtgcgcattttattctgatccacagtgtttgccatggcgcctggctgtggtataaactgatcccgttattacagtctgcaggtcataacgttacggcgattgatctttgggctagcgggagtaatcctcgccaactggaacagattggcacatgggagcagtactcagaaccattgttcaccctgatcgaatcgattccggaaggtaagaaagtcattctggtaggagaagcgggtggcggcatcaatattgcactggccgcggagaaatatccggagaaagtgagcgccctcgtctttgtgaacgcacttatgcccgatatcgatcacagtccagcgttcgtgtataagaaatatagcgaagttttcactgactggaaagattcgatcttcagcaattatacctacggtaacgacacggttaccgcggtggaattgggagatcgtactctggccgagaacatcttctccaattctccgattgaagatgtagaactggcgaaacatcgtgtccgcaaaggctccttttttctgcaagacttggataccctgccgaactttacgtcggaagggtatggttcaattcgtcgtgtgtatgtttacggcgaagaagaccagatctttagccgcgattttcagttatggcaaattaataattataagcctgataaagtgtactgtgtaccgagtgctgaccacaagattatgatcagccgcgtcaacgagctggcccagattctccaagaagttgcaaactctgcgagtgatcttcttgcagtggct

SEQ ID NO: 1402 - protein, 263 aa, synthetic construct
  REGION 1..263: note = Round 6 (Selectivity)
MGSAHFILIHSVCHGAWLWYKLIPLLQSAGHNVTAIDLWASGSNPRQLEQIGTWEQYSEPLFTLIESIPEGKKVILVGEAGGGINIALAAEKYPEKVSALVFVNALMPDIDHSPAFVYKKYSEVFTDWKDSIFSNYTYGNDTVTAVELGDRTLAENIFSNSPIEDVELAKHRVRKGSFFLQDLDTLPNFTSEGYGSIRRVYVYGEEDQIFSRDFQLWQINNYKPDKVYCVPSADHKIMISRVNELAQILQEVANSASDLLAVA

SEQ ID NO: 1403 - DNA, 789 bp, synthetic construct
  misc_feature 1..789: note = Round 6 (Selectivity)
  source 1..789: mol_type = other DNA
atggttagtgcgcattttattctgatccacagtgtttgccatggcgcctggctgtggtataaactgatcccgttattacagtctgcaggtcataacgttacggcgattgatcttatggctagcgggagtaatcctcgccaactggaacagattggcacatgggagcagtactcagaaccattgttcaccctgatcgaatcgattccggaaggtaagaaagtcattctggtaggagaagcgggtggcggcatcaatattgcactggccgcggagaaatatccggagaaagtgagcgccctcgtctttgtgaacgcacttatgcccgatatcgatcacagtccagcgttcgtgtataagaaatatagcgaagttttcactgactggaaagattcgatcttcagcaattatacctacggtaacgacacggttaccgcggtggaattgggagatcgtactctggccgagaacatcttctccaattctccgattgaagatgtagaactggcgaaacatcgtgtccgcaaaggctccttttttctgcaagacttggataccctgccgaactttacgtcggaagggtatggttcaattcgtcgtgtgtatgtttacggcgaagaagaccagatctttagccgcgattttcagttatggcaaattaataattataagcctgataaagtgtactgtgtaccgagtgctgaccacaagattatgatcagccgcgtcaacgagctggcccagattctccaagaagttgcaaactctgcgagtgatcttcttgcagtggct

SEQ ID NO: 1404 - protein, 263 aa, synthetic construct
  REGION 1..263: note = Round 6 (Selectivity)
MVSAHFILIHSVCHGAWLWYKLIPLLQSAGHNVTAIDLMASGSNPRQLEQIGTWEQYSEPLFTLIESIPEGKKVILVGEAGGGINIALAAEKYPEKVSALVFVNALMPDIDHSPAFVYKKYSEVFTDWKDSIFSNYTYGNDTVTAVELGDRTLAENIFSNSPIEDVELAKHRVRKGSFFLQDLDTLPNFTSEGYGSIRRVYVYGEEDQIFSRDFQLWQINNYKPDKVYCVPSADHKIMISRVNELAQILQEVANSASDLLAVA

SEQ ID NO: 1405 - DNA, 789 bp, synthetic construct
  misc_feature 1..789: note = Round 6 (Selectivity)
  source 1..789: mol_type = other DNA
atggttagtgcgcattttattctgatccacagtgtttgccatggcgcctggctgtggtataaactgatcccgttattacagtctgcaggtcataacgttacggcgattgatctttgggctagcgggagtaatcctcaccaactggaacagattggcacatggcgccagtactcagaaccattgttcaccctgatcgaatcgattccggaaggtaagaaagtcattctggtaggagaagcgggtggcggcatcaatattgcactggccgcggaggcctatccggagaaagtgagcgccctcgtctttgtgaacgcacttatgcccgatatcgatcacagtccagcgttcgtgtataagaaatatagcgaagttttcactgactggaaagattcgatcttcagcaattatacctacggtaacgacacggttaccgcggtggaattgggagatcgtactctggccgagaacatcttctccaattctccgattgaagatgtagaactggcgaaacatcgtgtccgcaaaggctccttttttctgcaagacttggataccctgccgaactttacgtcggaagggtatggttcaattcgtcgtgtgtatgtttacggcgaagaagaccagatctttagccgcgattttcagttatggcaaattaataattataagcctgataaagtgtactgtgtaccgagtgctgaccacaagattatgatcagccgcgtcaacgagctggcccagattctccaagaagttgcaaactctgcgagtgatcttcttgcagtggct

SEQ ID NO: 1406 - protein, 263 aa, synthetic construct
  REGION 1..263: note = Round 6 (Selectivity)
MVSAHFILIHSVCHGAWLWYKLIPLLQSAGHNVTAIDLWASGSNPHQLEQIGTWRQYSEPLFTLIESIPEGKKVILVGEAGGGINIALAAEAYPEKVSALVFVNALMPDIDHSPAFVYKKYSEVFTDWKDSIFSNYTYGNDTVTAVELGDRTLAENIFSNSPIEDVELAKHRVRKGSFFLQDLDTLPNFTSEGYGSIRRVYVYGEEDQIFSRDFQLWQINNYKPDKVYCVPSADHKIMISRVNELAQILQEVANSASDLLAVA

SEQ ID NO: 1407 - DNA, 789 bp, synthetic construct
  misc_feature 1..789: note = Round 6 (Selectivity)
  source 1..789: mol_type = other DNA
atggttagtgcgcattttattctgatccacagtgtttgccatggcgcctggctgtggtataaactgatcccgttattacagtctgcaggtcataacgttacggcgattgatctttgggctagcgggagtaatcctcaccaactggaacagattggcacatgggagcagtactcagaaccattgttcaccctgatcgaatcgattccgaacggtaagaaagtcattctggtaggagaagcgggtggcggcatcaatattgcactggccgcggaggcctatccggagaaagtgagcgccctcgtctttgtgaacgcacttatgcccgatatcgatcacagtccagcgttcgtggtaaagaaatatagcgaagttttcactgactggaaagattcgatcttcagcaattatacctacggtaacgacacggttaccgcggtggaattgggagatcgtactctggccgagaacatcttctccaattctccgattgaagatgtagaactggcgaaacatcgtgtccgcaaaggctccttttttctgcaagacttggataccctgccgaactttacgtcggaagggtatggttcaattcgtcgtgtgtatgtttacggcgaagaagaccagatctttagccgcgattttcagttatggcaaattaataattataagcctgataaagtgtactgtgtaccgagtgctgaccacaagattatgatcagccgcgtcaacgagctggcccagattctccaagaagttgcaaactctgcgagcgatcttcttggggtgctg

SEQ ID NO: 1408 - protein, 263 aa, synthetic construct
  REGION 1..263: note = Round 6 (Selectivity)
MVSAHFILIHSVCHGAWLWYKLIPLLQSAGHNVTAIDLWASGSNPHQLEQIGTWEQYSEPLFTLIESIPNGKKVILVGEAGGGINIALAAEAYPEKVSALVFVNALMPDIDHSPAFVVKKYSEVFTDWKDSIFSNYTYGNDTVTAVELGDRTLAENIFSNSPIEDVELAKHRVRKGSFFLQDLDTLPNFTSEGYGSIRRVYVYGEEDQIFSRDFQLWQINNYKPDKVYCVPSADHKIMISRVNELAQILQEVANSASDLLGVL

SEQ ID NO: 1409 - DNA, 789 bp, synthetic construct
  misc_feature 1..789: note = Round 6 (Selectivity)
  source 1..789: mol_type = other DNA
atggttagtgcgcattttgtcctgatccacagtgtttgccatggcgcctggctgtggtataaactgatcccgttattacagtctgcaggtcataacgttacggcgattgatctttgggctagcgggagtaatcctcaccaactggaacagattggcacatgggagcagtactcagaaccattgttcaccctgatcgaatcgattccggaaggtaagaaagtcattctggtaggagaagcgggtggcggcatcaatattgcactggccgcggagaaatatccggagaaagtgagcgccctcgtctttgtgaacgcacttatgcccgatatcgatcacagtccagcgttcgtgtataagaaatatagcgaagttttcactgactggaaagattcgatcttcagcaattatacctacggtaacgacacggttaccgcggtggaattgggagatcgtactctggccgagaacatcttctccaattctccgattgaagatgtagaactggcgaaacatcgtgtccgcaagggctccttttttctgcaagacttggataccctgccgaactttacgtcggaagggtatggttcaattcgtcgtgtgtatgtttacggcgaagaagaccagatctttagccgcgattttcagttatggcaaattaataattataagcctgataaagtgtactgtgtaccgagtgctgaccacaagattatgatcagccgcgtcaacgagctggcccagattctccaagaagttgcaaactctgcgagcgatcttcttgcggtggcg

SEQ ID NO: 1410 - protein, 263 aa, synthetic construct
  REGION 1..263: note = Round 6 (Selectivity)
MVSAHFVLIHSVCHGAWLWYKLIPLLQSAGHNVTAIDLWASGSNPHQLEQIGTWEQYSEPLFTLIESIPEGKKVILVGEAGGGINIALAAEKYPEKVSALVFVNALMPDIDHSPAFVYKKYSEVFTDWKDSIFSNYTYGNDTVTAVELGDRTLAENIFSNSPIEDVELAKHRVRKGSFFLQDLDTLPNFTSEGYGSIRRVYVYGEEDQIFSRDFQLWQINNYKPDKVYCVPSADHKIMISRVNELAQILQEVANSASDLLAVA

SEQ ID NO: 1411 - DNA, 789 bp, synthetic construct
  misc_feature 1..789: note = Round 6 (Selectivity)
  source 1..789: mol_type = other DNA
atggttagtgcgcattttatcctgatccacagtgtttgccatggcgcctggctgtggtataaactgatcccgttattacagtctgcaggtcataacgttacggcgattgatctttgggctagcgggagtaatcctcaccaactggaacagattggcacatgggagcagtactcagaaccattgttcaccctgatcgaatcgattccggaaggtaagaaagtcattctggtaggagaagcgggtggcggcatcaatattgcactggccgcggagaagtatccggagaaagtgagcgccctcgtctttgtgaacgcacttatgcccgatatcgatcacagtccagcgttcgtgtataagaaatatagcgaagttttcactgactggaaagattcgatcttcagcaattatacctacggtaacgacacggttaccgcggtggaattgggagatcgtactctggccgagaacatcttctccaattctccgattgaagatgtagaactggcgaaacatcgtgtccgcaaaggctccttttttctgcaagacttggataccctgccgaactttacgtcggaagggtatggttcaattcgtcgtgtgtatgtttacggcgaagaagaccagatctttagccgcgattttcagttatggcaaattaataattataagcctgataaagtgtactgtgtaccgagtgctgaccacaagattatgatcagccgcgtcaacgagctggcccagattctccaagaagttgcaaactctgcgagtgatcttcttgcagtggct

SEQ ID NO: 1412 - protein, 263 aa, synthetic construct
  REGION 1..263: note = Round 6 (Selectivity)
MVSAHFILIHSVCHGAWLWYKLIPLLQSAGHNVTAIDLWASGSNPHQLEQIGTWEQYSEPLFTLIESIPEGKKVILVGEAGGGINIALAAEKYPEKVSALVFVNALMPDIDHSPAFVYKKYSEVFTDWKDSIFSNYTYGNDTVTAVELGDRTLAENIFSNSPIEDVELAKHRVRKGSFFLQDLDTLPNFTSEGYGSIRRVYVYGEEDQIFSRDFQLWQINNYKPDKVYCVPSADHKIMISRVNELAQILQEVANSASDLLAVA

SEQ ID NO: 1413 - DNA, 789 bp, synthetic construct
  misc_feature 1..789: note = Round 6 (Selectivity)
  source 1..789: mol_type = other DNA
atggttagtgcgcattttattctgatccacagtgtttgccatggcgcctggctgtggtataaactgatcccgttattacagtctgcaggtcataacgttacggcgattgatctttgggctagcgggagtaatcctcgccaactggaacagattggcacatgggagcagtactcagaaccattgttcaccctgatcgaatcgattccggaaggtaagaaagtcattctggtaggagaagcgggtggcggcatcaatattgcactggccgcggagaagtatccggagaaagtgagcgccctcgtctttgtgaacgcacttatgcccgatatcgatcacagtccagcgttcgtggtaaagaaatatagcgaagttttcactgactggaaagattcgatcttcagcaattatacctacggtaacgacacggttaccgcggtggaattgggagatcgtactctggccgagaacatcttctccaattctccgattgaagatgtagaactggcgaaacatcgtgtccgcaaaggctccttttttctgcaagacttggataccctgccgaactttacgtcggaagggtatggttcaattcgtcgtgtgtatgtttacggcgaagaagaccagatctttagccgcgattttcagttatggcaaattaataattataagcctgataaagtgtactgtgtaccgagtgctgaccacaagattatgatcagccgcgtcaacgagctggcccagattctccaagaagttgcaaactctgcgagtgatcttcttgcagtggct

SEQ ID NO: 1414 - protein, 263 aa, synthetic construct
  REGION 1..263: note = Round 6 (Selectivity)
MVSAHFILIHSVCHGAWLWYKLIPLLQSAGHNVTAIDLWASGSNPRQLEQIGTWEQYSEPLFTLIESIPEGKKVILVGEAGGGINIALAAEKYPEKVSALVFVNALMPDIDHSPAFVVKKYSEVFTDWKDSIFSNYTYGNDTVTAVELGDRTLAENIFSNSPIEDVELAKHRVRKGSFFLQDLDTLPNFTSEGYGSIRRVYVYGEEDQIFSRDFQLWQINNYKPDKVYCVPSADHKIMISRVNELAQILQEVANSASDLLAVA

SEQ ID NO: 1415 - DNA, 789 bp, synthetic construct
  misc_feature 1..789: note = Round 6 (Selectivity)
  source 1..789: mol_type = other DNA
atggttagtgcgcattttattctgatccacagtgtttgccatggcgcctggctgtggtataaactgatcccgttattacagtctgcaggtcataacgttacggcgattgatctttgggctagcgggagtaatcctcgccaactggaacagattggcacatgggagcagtactcagaaccattgttcaccctgatcgaatcgattccggaaggtaagaaagtcattctggtaggagaagcgggtggcggcatcaatattgcactggccgcggagaaatatccggagaaagtgagcgccctcgtctttgtgaacgcacttatgcccgatatcgatcacagtccagcgttcgtgtataagaaatatagcgaagttttcactgactggaaagattcgatcttcagcaattatacctacggtaacgacacggttaccgcggtggaattgggagatcgtactctggccgagaacatcttctccaattctccgattgaagatgtagaactggcgaaacatcgtgtccgcaaaggctccttttttctgcaagacttggataccctgccgaactttacgtcggaagggtatggttcaattcgtcgtgtgtatgtttacggcgaagaagaccagatctttagccgcgattttcagttatggcaaattaataattataagcctgataaagtgtactgtgtaccgagtgctgaccacaagattatgatcagccgcgtcaacgagctggcccagattctccaagaagttgcaaactctgcgagcgatcttcttgcggtgggt

SEQ ID NO: 1416 - protein, 263 aa, synthetic construct
  REGION 1..263: note = Round 6 (Selectivity)
MVSAHFILIHSVCHGAWLWYKLIPLLQSAGHNVTAIDLWASGSNPRQLEQIGTWEQYSEPLFTLIESIPEGKKVILVGEAGGGINIALAAEKYPEKVSALVFVNALMPDIDHSPAFVYKKYSEVFTDWKDSIFSNYTYGNDTVTAVELGDRTLAENIFSNSPIEDVELAKHRVRKGSFFLQDLDTLPNFTSEGYGSIRRVYVYGEEDQIFSRDFQLWQINNYKPDKVYCVPSADHKIMISRVNELAQILQEVANSASDLLAVG

SEQ ID NO: 1417 - DNA, 789 bp, synthetic construct
  misc_feature 1..789: note = Round 6 (Selectivity)
  source 1..789: mol_type = other DNA
atggttagtgcgcattttattctgatccacagtgtttgccatggcgcctggctgtggtataaactgatcccgttattacagtctgcaggtcataacgttacggcgattgatctttgggctagcgggagtaatcctcgccaactggaacagattggcacatggcgccagtactcagaaccattgttcaccctgatcgaatcgattccggaaggtaagaaagtcattctggtaggagaagcgggtggcggcatcaatattgcactggccgcggagaagtatccggagaaagtgagcgccctcgtctttgtgaacgcacttatgcccgatatcgatcacagtccagcgttcgtgtataagaaatatagcgaagttttcactgactggaaagattcgatcttcagcaattatacctacggtaacgacacggttaccgcggtggaattgggagatcgtactctggccgagaacatcttctccaattctccgattgaagatgtagaactggcgaaacatcgtgtccgcaaaggctccttttttctgcaagacttggataccctgccgaactttacgtcggaagggtatggttcaattcgtcgtgtgtatgtttacggcgaagaagaccagatctttagccgcgattttcagttatggcaaattaataattataaacctgataaagtgtactgtgtaccgagtgctgaccacaagattatgatcagccgcgtcaacgagctggcccagattctccaagaagttgcaaactctgcgagcgatcttcttggggtgatc

SEQ ID NO: 1418 - protein, 263 aa, synthetic construct
  REGION 1..263: note = Round 6 (Selectivity)
MVSAHFILIHSVCHGAWLWYKLIPLLQSAGHNVTAIDLWASGSNPRQLEQIGTWRQYSEPLFTLIESIPEGKKVILVGEAGGGINIALAAEKYPEKVSALVFVNALMPDIDHSPAFVYKKYSEVFTDWKDSIFSNYTYGNDTVTAVELGDRTLAENIFSNSPIEDVELAKHRVRKGSFFLQDLDTLPNFTSEGYGSIRRVYVYGEEDQIFSRDFQLWQINNYKPDKVYCVPSADHKIMISRVNELAQILQEVANSASDLLGVI

SEQ ID NO: 1419 - DNA, 789 bp, synthetic construct
  misc_feature 1..789: note = Round 6 (Activity)
  source 1..789: mol_type = other DNA
atggttagtgcgcattttattctgatccacagtgtttgccatggcgcctggctgtggtataaactgatcccgttattacagtctgcaggtcataacgttacggcgattgatcttggggctagcgggagtaatcctcgccaactggaacagattggcacatgggagcagtactcagaaccattgttcaccctgatcgaatcgattccggaaggtaagaaagtcattctggtaggagaagcgggtggcggcatcaatattgcactggccgcggagaaatatccggagaaagtgagcgccctcgtctttgtgaacgcacttatgcccgatatcgatcacagtccagcgttcgtgtataagaaatatagcgaagttttcactgactggaaagattcgatcttcagcaattatacctacggtaacgacacggttaccgcggtggaattgggagatcgtactctggccgagaacatcttctccaattctccgattgaagatgtagaactggcgaaacatcgtgtccgcaaaggctccttttttctgcaagacttggataccctgccgaactttacgtcggaagggtatggttcaattcgtcgtgtgtatgtttacggcgaagaagaccagatctttagccgcgattttcagttatggcaaattaataattataagcctgataaagtgtactgtgtaccgagtgctgaccacaagattatgatcagccgcgtcaacgagctggcccagattctccaagaagttgcaaactctgcgagtgatcttcttgcagtggct

SEQ ID NO: 1420 - protein, 263 aa, synthetic construct
  REGION 1..263: note = Round 6 (Activity)
MVSAHFILIHSVCHGAWLWYKLIPLLQSAGHNVTAIDLGASGSNPRQLEQIGTWEQYSEPLFTLIESIPEGKKVILVGEAGGGINIALAAEKYPEKVSALVFVNALMPDIDHSPAFVYKKYSEVFTDWKDSIFSNYTYGNDTVTAVELGDRTLAENIFSNSPIEDVELAKHRVRKGSFFLQDLDTLPNFTSEGYGSIRRVYVYGEEDQIFSRDFQLWQINNYKPDKVYCVPSADHKIMISRVNELAQILQEVANSASDLLAVA

SEQ ID NO: 1421 - DNA, 789 bp, synthetic construct
  misc_feature 1..789: note = Round 6 (Selectivity)
  source 1..789: mol_type = other DNA
atggttagtgcgcattttattctgatccacagtgtttgccatggcgcctggctgtggtataaactgatcccgttattacagtctgcaggtcataacgttacggcgattgatctttgggctagcgggagtaatcctcgccaactggaacagattggcacatggcgccagtactcagaaccattgttcaccctgatcgaatcgattccggaaggtaagaaagtcattctggtaggagaagcgggtggcggcatcaatattgcactggccgcggagaagtatccggagaaagtgagcgccctcgtctttgtgaacgcacttatgcccgatatcgatcacagtccagcgttcgtgtataagaaatatagcgaagttttcactgactggaaagattcgatcttcagcaattatacctacggtaacgacacggttaccgcggtggaattgggagatcgtactctggccgagaacatcttctccaattctccgattgaagatgtagaactggcgaaacatcgtgtccgcaaaggctccttttttctgcaagacttggataccctgccgaactttacgtcggaagggtatggttcaattcgtcgtgtgtatgtttacggcgaagaagaccagatctttagccgcgattttcagttatggcaaattaataattataagcctgataaagtgtactgtgtaccgagtgctgaccacaagattatgatcagccgcgtcaacgagctggcccagattctccaagaagttgcaaactctgcgcaagatcttcttggggtggcg

SEQ ID NO: 1422 - protein, 263 aa, synthetic construct
  REGION 1..263: note = Round 6 (Selectivity)
MVSAHFILIHSVCHGAWLWYKLIPLLQSAGHNVTAIDLWASGSNPRQLEQIGTWRQYSEPLFTLIESIPEGKKVILVGEAGGGINIALAAEKYPEKVSALVFVNALMPDIDHSPAFVYKKYSEVFTDWKDSIFSNYTYGNDTVTAVELGDRTLAENIFSNSPIEDVELAKHRVRKGSFFLQDLDTLPNFTSEGYGSIRRVYVYGEEDQIFSRDFQLWQINNYKPDKVYCVPSADHKIMISRVNELAQILQEVANSAQDLLGVA

SEQ ID NO: 1423 - DNA, 789 bp, synthetic construct
  misc_feature 1..789: note = Round 6 (Selectivity)
  source 1..789: mol_type = other DNA
atggttagtgcgcattttattctgatccacagtgtttgccatggcgcctggctgtggtataaactgatcccgttattacagtctgcaggtcataacgttacggcgattgatctttgggctagcgggagtaatcctcaccaactggaacagattggcacatggcgccagtactcagaaccattgttcaccctgatcgaatcgattccggaaggtaagaaagtcattctggtaggagaagcgggtggcggcatcaatattgcactggccgcggagaaatatccggagaaagtgagcgccctcgtctttgtgaacgcacttatgcccgatatcgatcacagtccagcgttcgtggtaaagaaatatagcgaagttttcactgactggaaagattcgatcttcagcaattatacctacggtaacgacacggttaccgcggtggaattgggagatcgtactctggccgagaacatcttctccaattctccgattgaagatgtagaactggcgaaacatcgtgtccgcaaaggctccttttttctgcaagacttggataccctgccgaactttacgtcggaagggtatggttcaattcgtcgtgtgtatgtttacggcgaagaagaccagatctttagccgcgattttcagttatggcaaattaataattataagcctgataaagtgtactgtgtaccgagtgctgaccacaagattatgatcagccgcgtcaacgagctggcccagattctccaagaagttgcaaactctgcgagcgatcttcttgcggtgagt

SEQ ID NO: 1424 - protein, 263 aa, synthetic construct
  REGION 1..263: note = Round 6 (Selectivity)
MVSAHFILIHSVCHGAWLWYKLIPLLQSAGHNVTAIDLWASGSNPHQLEQIGTWRQYSEPLFTLIESIPEGKKVILVGEAGGGINIALAAEKYPEKVSALVFVNALMPDIDHSPAFVVKKYSEVFTDWKDSIFSNYTYGNDTVTAVELGDRTLAENIFSNSPIEDVELAKHRVRKGSFFLQDLDTLPNFTSEGYGSIRRVYVYGEEDQIFSRDFQLWQINNYKPDKVYCVPSADHKIMISRVNELAQILQEVANSASDLLAVS

SEQ ID NO: 1425 - DNA, 789 bp, synthetic construct
  misc_feature 1..789: note = Round 6 (Selectivity)
  source 1..789: mol_type = other DNA
atggttagtgcgcattttattctgatccacagtgtttgccatggcgcctggctgtggtataaactgatcccgttattacagtctgcaggtcataacgttacggcgattgatcttagtgctagcgggagtaatcctcgccaactggaacagattggcacatgggagcagtactcagaaccattgttcaccctgatcgaatcgattccggaaggtaagaaagtcattctggtaggagaagcgggtggcggcatcaatattgcactggccgcggagaaatatccggagaaagtgagcgccctcgtctttgtgaacgcacttatgcccgatatcgatcacagtccagcgttcgtgtataagaaatatagcgaagttttcactgactggaaagattcgatcttcagcaattatacctacggtaacgacacggttaccgcggtggaattgggagatcgtactctggccgagaacatcttctccaattctccgattgaagatgtagaactggcgaaacatcgtgtccgcaaaggctccttttttctgcaagacttggataccctgccgaactttacgtcggaagggtatggttcaattcgtcgtgtgtatgtttacggcgaagaagaccagatctttagccgcgattttcagttatggcaaattaataattataagcctgataaagtgtactgtgtaccgagtgctgaccacaagattatgatcagccgcgtcaacgagctggcccagattctccaagaagttgcaaactctgcgagtgatcttcttgcagtggct

SEQ ID NO: 1426 - protein, 263 aa, synthetic construct; identical to SEQ ID NO: 1368
  REGION 1..263: note = Round 6 (Selectivity)

SEQ ID NO: 1427 - DNA, 789 bp, synthetic construct; identical to SEQ ID NO: 1377
  misc_feature 1..789: note = Round 6 (Selectivity)
  source 1..789: mol_type = other DNA

SEQ ID NO: 1428 - protein, 263 aa, synthetic construct; identical to SEQ ID NO: 1378
  REGION 1..263: note = Round 6 (Selectivity)

SEQ ID NO: 1429 - DNA, 789 bp, synthetic construct
  misc_feature 1..789: note = Round 6 (Selectivity)
  source 1..789: mol_type = other DNA
atggttagtgcgcattttattctgatccacagtgtttgccatggcgcctggctgtggtataaactgatcccgttattacagtctgcaggtcataacgttacggcgattgatcttactgctagcgggagtaatcctcgccaactggaacagattggcacatgggagcagtactcagaaccattgttcaccctgatcgaatcgattccggaaggtaagaaagtcattctggtaggagaagcgggtggcggcatcaatattgcactggccgcggagaaatatccggagaaagtgagcgccctcgtctttgtgaacgcacttatgcccgatatcgatcacagtccagcgttcgtgtataagaaatatagcgaagttttcactgactggaaagattcgatcttcagcaattatacctacggtaacgacacggttaccgcggtggaattgggagatcgtactctggccgagaacatcttctccaattctccgattgaagatgtagaactggcgaaacatcgtgtccgcaaaggctccttttttctgcaagacttggataccctgccgaactttacgtcggaagggtatggttcaattcgtcgtgtgtatgtttacggcgaagaagaccagatctttagccgcgattttcagttatggcaaattaataattataagcctgataaagtgtactgtgtaccgagtgctgaccacaagattatgatcagccgcgtcaacgagctggcccagattctccaagaagttgcaaactctgcgagtgatcttcttgcagtggct

SEQ ID NO: 1430 - protein, 263 aa, synthetic construct; identical to SEQ ID NO: 1370
  REGION 1..263: note = Round 6 (Selectivity)

SEQ ID NO: 1431 - DNA, 789 bp, synthetic construct
  misc_feature 1..789: note = Round 6 (Selectivity)
  source 1..789: mol_type = other DNA
atggttagtgcgcattttattctgatccacagtgtttgccatggcgcctggctgtggtataaactgatcccgttattacagtctgcaggtcataacgttacggcgattgatctttgggctagcgggagtaatcctcaccaactggaacagattggcacatgggagcagtactcagaaccattgttcaccctgatcgaatcgattccggaaggtaagaaagtcattctggtaggagaagcgggtggcggcatcaatattgcactggccgcggaggcctatccggagaaagtgagcgccctcgtctttgtgaacgcacttatgcccgatatcgatcacagtccagcgttcgtgtataagaaatatagcgaagttttcactgactggaaagattcgatcttcagcaattatacctacggtaacgacacggttaccgcggtggaattgggagatcgtactctggccgagaacatcttctccaattctccgattgaagatgtagaactggcgaaacatcgtgtccgcaaaggctccttttttctgcaagacttggataccctgccgaactttacgtcggaagggtatggttcaattcgtcgtgtgtatgtttacggcgaagaagaccagatctttagccgcgattttcagttatggcaaattaataattataagcctgataaagtgtactgtgtaccgagtgctgaccacaagattatgatcagccgcgtcaacgagctggcccagattctccaagaagttgcaaactctgcgagtgatcttcttgcagtggct

SEQ ID NO: 1432 - protein, 263 aa, synthetic construct
  REGION 1..263: note = Round 6 (Selectivity)
MVSAHFILIHSVCHGAWLWYKLIPLLQSAGHNVTAIDLWASGSNPHQLEQIGTWEQYSEPLFTLIESIPEGKKVILVGEAGGGINIALAAEAYPEKVSALVFVNALMPDIDHSPAFVYKKYSEVFTDWKDSIFSNYTYGNDTVTAVELGDRTLAENIFSNSPIEDVELAKHRVRKGSFFLQDLDTLPNFTSEGYGSIRRVYVYGEEDQIFSRDFQLWQINNYKPDKVYCVPSADHKIMISRVNELAQILQEVANSASDLLAVA

SEQ ID NO: 1433 - DNA, 789 bp, synthetic construct
  misc_feature 1..789: note = Round 6 (Selectivity)
  source 1..789: mol_type = other DNA
atggttagtgcgcattttattctgatccacagtgtttgccatggcgcctggctgtggtataaactgatcccgttattacagtctgcaggtcataacgttacggcgattgatctttgggctagcgggagtaatcctcaccaactggaacagattggcacatgggagcagtactcagaaccattgttcaccctgatcgaatcgattccggaaggtaagaaagtcattctggtaggagaagcgggtggcggcatcaatattgcactggccgcggagaaatatccggagaaagtgagcgccctcgtctttgtgaacgcacttatgcccgatatcgatcacagtccagcgttcgtgtataagaaatatagcgaagttttcactgactggaaagattcgatcttcagcaattatacctacggtaacgacacggttaccgcgatcgaattgggagatcgtactctggccgagaacatcttctccaattctccgattgaagatgtagaactggcgaaacatcgtgtccgcaaaggctccttttttctgcaagacttggataccctgccgaactttacgtcggaagggtatggttcaattcgtcgtgtgtatgtttacggcgaagaagaccagatctttagccgcgattttcagttatggcaaattaataattataagcctgataaagtgtactgtgtaccgagtgctgaccacaagattatgatcagccgcgtcaacgagctggcccagattctccaagaagttgcaaactctgcgagtgatcttcttgcagtggct

SEQ ID NO: 1434 - protein, 263 aa, synthetic construct
  REGION 1..263: note = Round 6 (Selectivity)
MVSAHFILIHSVCHGAWLWYKLIPLLQSAGHNVTAIDLWASGSNPHQLEQIGTWEQYSEPLFTLIESIPEGKKVILVGEAGGGINIALAAEKYPEKVSALVFVNALMPDIDHSPAFVYKKYSEVFTDWKDSIFSNYTYGNDTVTAIELGDRTLAENIFSNSPIEDVELAKHRVRKGSFFLQDLDTLPNFTSEGYGSIRRVYVYGEEDQIFSRDFQLWQINNYKPDKVYCVPSADHKIMISRVNELAQILQEVANSASDLLAVA

SEQ ID NO: 1435 - DNA, 789 bp, synthetic construct
  misc_feature 1..789: note = Round 6 (Selectivity)
  source 1..789: mol_type = other DNA
atggttagtgcgcattttattctgatccacagtgtttgccatggcgcctggctgtggtataaagtgatcccgttattacagtctgcaggtcataacgttacggcgattgatctttgggctagcgggagtaatcctcaccaactggaacagattggcacatggcgccagtactcagaaccattgttcaccctgatcgaatcgattccggaaggtaagaaagtcattctggtaggagaagcgggtggcggcatcaatattgcactggccgcggagaaatatccggagaaagtgagcgccctcgtctttgtgaacgcacttatgcccgatatcgatcacagtccagcgttcgtggtaaagaaatatagcgaagttttcactgactggaaagattcgatcttcagcaattatacctacggtaacgacacggttaccgcggtcgaattgggagatcgtactctggccgagaacatcttctccaattctccgattgaagatgtagaactggcgaaacatcgtgtccgcaaaggctccttttttctgcaagacttggataccctgccgaactttacgtcggaagggtatggttcaattcgtcgtgtgtatgtttacggcgaagaagaccagatctttagccgcgattttcagttatggcaaattaataattataagcctgataaagtgtactgtgtaccgagtgctgaccacaagattatgatcagccgcgtcaacgagctggcccagattctccaagaagttgcaaactctgcgagtgatcttcttgcagtggct

SEQ ID NO: 1436 - protein, 263 aa, synthetic construct
  REGION 1..263: note = Round 6 (Selectivity)
MVSAHFILIHSVCHGAWLWYKVIPLLQSAGHNVTAIDLWASGSNPHQLEQIGTWRQYSEPLFTLIESIPEGKKVILVGEAGGGINIALAAEKYPEKVSALVFVNALMPDIDHSPAFVVKKYSEVFTDWKDSIFSNYTYGNDTVTAVELGDRTLAENIFSNSPIEDVELAKHRVRKGSFFLQDLDTLPNFTSEGYGSIRRVYVYGEEDQIFSRDFQLWQINNYKPDKVYCVPSADHKIMISRVNELAQILQEVANSASDLLAVA

SEQ ID NO: 1437 - DNA, 789 bp, synthetic construct
  misc_feature 1..789: note = Round 6 (Selectivity)
  source 1..789: mol_type = other DNA
atggttagtgcgcattttattctgatccacagtgtttgccatggcgcctggctgtggtataaactgatcccgttattacagtctgcaggtcataacgttacggcgattgatctttgggctagcgggagtaatcctcgccaactggaacagattggcacatggcgccagtactcagaaccattgttcaccctgatcgaatcgattccggaaggtaagaaagtcattctggtaggagaagcgggtggcggcatcaatattgcactggccgcggagaagtatccggagaaagtgagcgccctcgtctttgtgaacgcacttatgcccgatatcgatcacagtccagcgttcgtgtataagaaatatagcgaagttttcactgactggaaagattcgatcttcagcaattatacctacggtaacgacacggttaccgcggtggaattgggagatcgtactctggccgagaacatcttctccaattctccgattgaagatgtagaactggcgaaacatcgtgtccgcaaaggctccttttttctgcaagacttggataccctgccgaactttacgtcggaggggtatggttcaattcgtcgtgtgtatgtctacggcgaagaagaccagatctttagccgcgattttcagttatggcaaattaataattataaacctgataaagtgtactgtgtaccgagtgctgaccacaagattatgatcagccgcgtcaacgagctggcccagattctccaagaagttgcaaactctgcgcaagatcttcttgcggtgctg

SEQ ID NO: 1438 - protein, 263 aa, synthetic construct
  REGION 1..263: note = Round 6 (Selectivity)
MVSAHFILIHSVCHGAWLWYKLIPLLQSAGHNVTAIDLWASGSNPRQLEQIGTWRQYSEPLFTLIESIPEGKKVILVGEAGGGINIALAAEKYPEKVSALVFVNALMPDIDHSPAFVYKKYSEVFTDWKDSIFSNYTYGNDTVTAVELGDRTLAENIFSNSPIEDVELAKHRVRKGSFFLQDLDTLPNFTSEGYGSIRRVYVYGEEDQIFSRDFQLWQINNYKPDKVYCVPSADHKIMISRVNELAQILQEVANSAQDLLAVL

SEQ ID NO: 1439 - DNA, 789 bp, synthetic construct
  misc_feature 1..789: note = Round 6 (Selectivity)
  source 1..789: mol_type = other DNA
atggtttcggcgcattttatcctgatccacagtgtttgccatggcgcctggctgtggtataaactgatcccgttattaggttctgcaggtcataacgttacggcgattgatctttgggctagcgggagtaatcctcgccaactggaacagattggcacatgggagcagtactcagaaccattgttcaccctgatcgaatcgattccggaaggtaagaaagtcattctggtaggagaagcgggtggcggcatcaatattgcactggccgcggagaagtatccggagaaagtgagcgccctcgtctttgtgaacgcacttatgcccgatatcgatcacagtccagcgttcgtggtaaagaaatatagcgaagttttcactgactggaaagattcgatcttcagcaattatacctacggtaacgacacggttaccgcggtggaattgggagatcgtactctggccgagaacatcttctccaattctccgattgaagatgtagaactggcgaaacatcgtgtccgcaaaggctccttttttctgcaagacttggataccctgccgaactttacgtcggaagggtatggttcaattcgtcgtgtgtatgtttacggcgaagaagaccagatctttagccgcgattttcagttatggcaaattaataattataagcctgataaagtgtactgtgtaccgagtgctgaccacaagattatgatcagccgcgtcaacgagctggcccagattctccaagaagttgcaaactctgcgagtgatcttcttgcagtggct

SEQ ID NO: 1440 - protein, 263 aa, synthetic construct
  REGION 1..263: note = Round 6 (Selectivity)
MVSAHFILIHSVCHGAWLWYKLIPLLGSAGHNVTAIDLWASGSNPRQLEQIGTWEQYSEPLFTLIESIPEGKKVILVGEAGGGINIALAAEKYPEKVSALVFVNALMPDIDHSPAFVVKKYSEVFTDWKDSIFSNYTYGNDTVTAVELGDRTLAENIFSNSPIEDVELAKHRVRKGSFFLQDLDTLPNFTSEGYGSIRRVYVYGEEDQIFSRDFQLWQINNYKPDKVYCVPSADHKIMISRVNELAQILQEVANSASDLLAVA

SEQ ID NO: 1441 - DNA, 789 bp, synthetic construct
  misc_feature 1..789: note = Round 6 (Selectivity)
  source 1..789: mol_type = other DNA
atggttagtgcgcattttattctgatccacagtgtttgccatggcgcctggctgtggtataaactgatcccgttattacagtctgcaggtcataacgttacggcgattgatctttgggctagcgggagtaatcctcaccaactggaacagattggcacatggcgccagtactcagaaccattgttcaccctgatcgaatcgattccggaaggtaagaaagtcattctggtaggagaagcgggtggcggcatcaatattgcactggccgcggagaaatatccggagaaagtgagcgccctcgtctttgtgaacgcacttatgcccgatatcgatcacagtccagcgttcgtgtataagaaatatagcgaagttttcactgactggaaagattcgatcttcagcaattatacctacggtaacgacacggttaccgcgatcgaattgggagatcgtactctggccgagaacatcttctccaattctccgattgaagatgtagaactggcgaaacatcgtgtccgcaaaggctccttttttctgcaagacttggataccctgccgaactttacgtcggaagggtatggttcaattcgtcgtgtgtatatctacggcgaagaagaccagatctttagccgcgattttcagttatggcaaattaataattataagcctgataaagtgtactgtgtaccgagtgctgaccacaagattatgatcagccgcgtcaacgagctggcccagattctccaagaagttgcaaactctgcgagtgatcttcttgcagtggct

SEQ ID NO: 1442 - protein, 263 aa, synthetic construct
  REGION 1..263: note = Round 6 (Selectivity)
MVSAHFILIHSVCHGAWLWYKLIPLLQSAGHNVTAIDLWASGSNPHQLEQIGTWRQYSEPLFTLIESIPEGKKVILVGEAGGGINIALAAEKYPEKVSALVFVNALMPDIDHSPAFVYKKYSEVFTDWKDSIFSNYTYGNDTVTAIELGDRTLAENIFSNSPIEDVELAKHRVRKGSFFLQDLDTLPNFTSEGYGSIRRVYIYGEEDQIFSRDFQLWQINNYKPDKVYCVPSADHKIMISRVNELAQILQEVANSASDLLAVA

SEQ ID NO: 1443 - DNA, 789 bp, synthetic construct
  misc_feature 1..789: note = Round 6 (Selectivity)
  source 1..789: mol_type = other DNA
atggttagtgcgcattttgtcctgatccacagtgtttgccatggcgcctggctgtggtataaactgatcccgttattacagtctgcaggtcataacgttacggcgattgatctttgggctagcgggagtaatcctcaccaactggaacagattggcacatgggagcagtactcagaaccattgttcaccctgatcgaatcgattccggaaggtaagaaagtcattctggtaggagaagcgggtggcggcatcaatattgcactggccgcggagaaatatccggagaaagtgagcgccctcgtctttgtgaacgcacttatgcccgatatcgatcacagtccagcgttcgtgtacaagaaatatagcgaagttttcactgactggaaagattcgatcttcagcaattatacctacggtaacgacacggttaccgcggtggaattgggagatcgtactctggccgagaacatcttctccaattctccgattgaagatgtagaactggcgaaacatcgtgtccgcccgggctccttttttctgcaagacttggataccctgccgaactttacgtcggaagggtatggttcaattcgtcgtgtgtatgtttacggcgaagaagaccagatctttagccgcgattttcagttatggcaaattaataattataagcctgataaagtgtactgtgtaccgagtgctgaccacaagattatgatcagccgcgtcaacgagctggcccagattctccaagaagttgcaaactctgcgagtgatcttcttgcagtggct

SEQ ID NO: 1444 - protein, 263 aa, synthetic construct
  REGION 1..263: note = Round 6 (Selectivity)
MVSAHFVLIHSVCHGAWLWYKLIPLLQSAGHNVTAIDLWASGSNPHQLEQIGTWEQYSEPLFTLIESIPEGKKVILVGEAGGGINIALAAEKYPEKVSALVFVNALMPDIDHSPAFVYKKYSEVFTDWKDSIFSNYTYGNDTVTAVELGDRTLAENIFSNSPIEDVELAKHRVRPGSFFLQDLDTLPNFTSEGYGSIRRVYVYGEEDQIFSRDFQLWQINNYKPDKVYCVPSADHKIMISRVNELAQILQEVANSASDLLAVA

SEQ ID NO: 1445 - DNA, 789 bp, synthetic construct
  misc_feature 1..789: note = Round 6 (Selectivity)
  source 1..789: mol_type = other DNA
atggttagtgcgcattttattctgatccacagtgtttgccatggcgcctggctgtggtataaactgatcccgttattacagtctgcaggtcataacgttacggcgattgatctttgggctagcgggagtaatcctcgccaactggaacagattggcacatgggagcagtactcagaaccattgttcaccctgatcgaatcgattccgaacggtaagaaagtcattctggtaggagaagcgggtggcggcatcaatattgcactggccgcggagaagtatccggagaaagtgagcgccctcgtctttgtgaacgcacttatgcccgatatcgatcacagtccagcgttcgtgtataagaaatatagcgaagttttcactgactggaaagattcgatcttcagcaattatacctacggtaacgacacggttaccgcggtggaattgggagatcgtactctggccgagaacatcttctccaattctccgattgaagatgtagaactggcgaaacatcgtgtccgcaaaggctccttttttctgcaagacttggataccctgccgaactttacgtcggaagggtatggttcaattcgtcgtgtgtatgtttacggcgaagaagaccagatctttagccgcgattttcagttatggcaaattaataattataagcctgataaagtgtactgtgtaccgagtgctgaccacaagattatgatcagccgcgtcaacgagctggcccagattctccaagaagttgcaaactctgcgagtgatcttcttgcagtggct

SEQ ID NO: 1446 - protein, 263 aa, synthetic construct
  REGION 1..263: note = Round 6 (Selectivity)
MVSAHFILIHSVCHGAWLWYKLIPLLQSAGHNVTAIDLWASGSNPRQLEQIGTWEQYSEPLFTLIESIPNGKKVILVGEAGGGINIALAAEKYPEKVSALVFVNALMPDIDHSPAFVYKKYSEVFTDWKDSIFSNYTYGNDTVTAVELGDRTLAENIFSNSPIEDVELAKHRVRKGSFFLQDLDTLPNFTSEGYGSIRRVYVYGEEDQIFSRDFQLWQINNYKPDKVYCVPSADHKIMISRVNELAQILQEVANSASDLLAVA

SEQ ID NO: 1447 - DNA, 789 bp, synthetic construct
  misc_feature 1..789: note = Round 6 (Selectivity)
  source 1..789: mol_type = other DNA
atggttagtgcgcattttattctgatccacagtgtttgccatggcgcctggctgtggtataaactgatcccgttattacagtctgcaggtcataacgttacggcgattgatctttgggctagcgggagtaatcctcgccaactggaacagattggcacatgggagcagtactcagaaccattgttcaccctgatcgaatcgattccggaaggtaagaaagtcattctggtaggagaagcgggtggcggcatcaatattgcactggccgcggagaagtatccggagaaagtgagcgccctcgtctttgtgaacgcacttatgcccgatatcgatcacagtccagcgttcgtgtacaagaaatatagcgaagttttcactgactggaaagattcgatcttcagcaattatacctacggtaacgacacggttaccgcgatcgaattgggagatcgtactctggccgagaacatcttctccaattctccgattgaagatgtagaactggcgaaacatcgtgtccgcaagggctccttttttctgcaagacttggataccctgccgaactttacgtcggaagggtatggttcaattcgtcgtgtgtatgtttacggcgaagaagaccagatctttagccgcgattttcagttatggcaaattaataattataagcctgataaagtgtactgtgtaccgagtgctgaccacaagattatgatcagccgcgtcaacgagctggcccagattctccaagaagttgcaaactctgcgagcgatcttcttggggtgctg

SEQ ID NO: 1448 - protein, 263 aa, synthetic construct
  REGION 1..263: note = Round 6 (Selectivity)
MVSAHFILIHSVCHGAWLWYKLIPLLQSAGHNVTAIDLWASGSNPRQLEQIGTWEQYSEPLFTLIESIPEGKKVILVGEAGGGINIALAAEKYPEKVSALVFVNALMPDIDHSPAFVYKKYSEVFTDWKDSIFSNYTYGNDTVTAIELGDRTLAENIFSNSPIEDVELAKHRVRKGSFFLQDLDTLPNFTSEGYGSIRRVYVYGEEDQIFSRDFQLWQINNYKPDKVYCVPSADHKIMISRVNELAQILQEVANSASDLLGVL

SEQ ID NO: 1449 - DNA, 789 bp, synthetic construct
  misc_feature 1..789: note = Round 6 (Selectivity)
  source 1..789: mol_type = other DNA
atggttagtgcgcattttattctgatccacagtgtttgccatggcgcctggctgtggtataaactgatcccgttattacagtctgcaggtcataacgttacggcgattgatctttgggctagcgggagtaatcctcaccaactggaacagattggcacatggcgccagtactcagaaccattgttcaccctgatcgaatcgattccggaaggtaagaaagtcattctggtaggagaagcgggtggcggcatcaatattgcactggccgcggagaagtatccggagaaagtgagcgccctcgtctttgtgaacgcacttatgcccgatatcgatcacagtccagcgttcgtgtataagaaatatagcgaagttttcactgactggaaagattcgatcttcagcaattatacctacggtaacgacacggttaccgcggtggaattgggagatcgtactctggccgagaacatcttctccaattctccgattgaagatgtagaactggcgaaacatcgtgtccgcaaaggctccttttttctgcaagacttggataccctgccgaactttacgtcggaagggtatggttcaattcgtcgtgtgtatgtttacggcgaagaagaccagatctttagccgcgattttcagttatggcaaattaataattataagcctgataaagtgtactgtgtaccgagtgctgaccacaagattatgatcagccgcgtcaacgagctggcccagattctccaagaagttgcaaactctgcgagtgatcttcttgcagtggct

SEQ ID NO: 1450 - protein, 263 aa, synthetic construct; identical to SEQ ID NO: 1388
  REGION 1..263: note = Round 6 (Selectivity)

SEQ ID NO: 1451 - DNA, 789 bp, synthetic construct
  misc_feature 1..789: note = Round 6 (Selectivity)
  source 1..789: mol_type = other DNA
atggttagtgcgcattttattctgatccacagtgtttgccatggcgcctggctgtggtataaactgatcccgttattacagtctgcaggtcataacgttacggcgattgatctttgggctagcgggagtaatcctcaccaactggaacagattggcacatggcgccagtactcaactccattgttcaccctgatcgaatcgattccggaaggtaagaaagtcattctggtaggagaagcgggtggcggcatcaatattgcactggccgcggagaaatatccggagaaagtgagcgccctcgtctttgtgaacgcacttatgcccgatatcgatcacagtccagcgttcgtgtataagaaatatagcgaagttttcactgactggaaagattcgatcttcagcaattatacctacggtaacgacacggttaccgcggtggaattgggagatcgtactctggccgagaacatcttctccaattctccgattgaagatgtagaactggcgaaacatcgtgtccgcaaaggctccttttttctgcaagacttggataccctgccgaactttacgtcggaagggtatggttcaattcgtcgtgtgtatgtctacggcgaagaagaccagatctttagccgcgattttcagttatggcaaattaataattataagcctgataaagtgtactgtgtaccgagtgctgaccacaagattatgatcagccgcgtcaacgagctggcccagattctccaagaagttgcaaactctgcgagcgatcttcttggggtgctg

SEQ ID NO: 1452 - protein, 263 aa, synthetic construct
  REGION 1..263: note = Round 6 (Selectivity)
MVSAHFILIHSVCHGAWLWYKLIPLLQSAGHNVTAIDLWASGSNPHQLEQIGTWRQYSTPLFTLIESIPEGKKVILVGEAGGGINIALAAEKYPEKVSALVFVNALMPDIDHSPAFVYKKYSEVFTDWKDSIFSNYTYGNDTVTAVELGDRTLAENIFSNSPIEDVELAKHRVRKGSFFLQDLDTLPNFTSEGYGSIRRVYVYGEEDQIFSRDFQLWQINNYKPDKVYCVPSADHKIMISRVNELAQILQEVANSASDLLGVL

SEQ ID NO: 1453 - DNA, 789 bp, synthetic construct
  misc_feature 1..789: note = Round 6 (Selectivity)
  source 1..789: mol_type = other DNA
atggttagtgcgcattttattctgatccacagtgtttgccatggcgcctggctgtggtataaactgatcccgttattacagtctgcaggtcataacgttacggcgattgatctttgggctagcgggagtaatcctcgccaactggaacagattggcacatgggagcagtactcagaaccattgttcaccctgatcgaatcgattccggaaggtaagaaagtcattctggtaggagaagcgggtggcggcatcaatattgcactggccgcggagaaatatccggagaaagtgagcgccctcgtctttgtgaacgcacttatgcccgatatcgatcacagtccagcgttcgtgtataagaaatatagcgaagttttcactgactggaaagattcgatcttcagcaattatacctacggtaacgacacggttaccgcggtggaattgggagatcgtactctggccgagaacatcttctccaattctccgattgaagatgtagaactggcgaaacatcgtgtccgcaagggctccttttttctgcaagacttggataccctgccgaactttacgtcggaagggtatggttcaattcgtcgtgtgtatgtttacggcgaagaagaccagatctttagccgcgattttcagttatggcaaattaataattataagcctgataaagtgtactgtgtaccgagtgctgaccacaagattatgatcagccgcgtcaacgagctggcccagattctccaagaagttgcaaactctgcgagcgatcttcttggggtgatc

SEQ ID NO: 1454 - protein, 263 aa, synthetic construct
  REGION 1..263: note = Round 6 (Selectivity)
MVSAHFILIHSVCHGAWLWYKLIPLLQSAGHNVTAIDLWASGSNPRQLEQIGTWEQYSEPLFTLIESIPEGKKVILVGEAGGGINIALAAEKYPEKVSALVFVNALMPDIDHSPAFVYKKYSEVFTDWKDSIFSNYTYGNDTVTAVELGDRTLAENIFSNSPIEDVELAKHRVRKGSFFLQDLDTLPNFTSEGYGSIRRVYVYGEEDQIFSRDFQLWQINNYKPDKVYCVPSADHKIMISRVNELAQILQEVANSASDLLGVI

SEQ ID NO: 1455 - DNA, 789 bp, synthetic construct
  misc_feature 1..789: note = Round 6 (Selectivity)
  source 1..789: mol_type = other DNA
atggtttcggcgcattttatcctgatccacagtgtttgccatggcgcctggctgtggtataaactgatcccgttattacagtctgcaggtcataacgttacggcgattgatctttgggctagcgggagtaatcctcgccaactggaacagattggcacatgggagcagtactcagaaccattgttcaccctgatcgaatcgattccggaaggtaagaaagtcattctggtaggagaagcgggtggcggcatcaatattgcactggccgcggagaaatatccggagaaagtgagcgccctcgtctttgtgaacgcacttatgcccgatatcgatcacagtccagcgttcgtgtataagaaatatagcgaagttttcactgactggaaagattcgatcttcagcaattatacctacggtaacgacacggttaccgcggtggaattgggagatcgtactctggccgagaacatcttctccaattctccgattgaagatgtagaactggcgaaacatcgtgtccgcaaaggctccttttttctgcaagacttggataccctgccgaattttacgtcggaggggtatggttcaattcgtcgtgtgtatatctacggcgaagaagaccagatctttagccgcgattttcagttatggcaaattaataattataagcctgataaagtgtactgtgtaccgagtgctgaccacaagattatgatcagccgcgtcaacgagctggcccagattctccaagaagttgcaaactctgcgagtgatcttcttgcagtggct

SEQ ID NO: 1456 - protein, 263 aa, synthetic construct
  REGION 1..263: note = Round 6 (Selectivity)
MVSAHFILIHSVCHGAWLWYKLIPLLQSAGHNVTAIDLWASGSNPRQLEQIGTWEQYSEPLFTLIESIPEGKKVILVGEAGGGINIALAAEKYPEKVSALVFVNALMPDIDHSPAFVYKKYSEVFTDWKDSIFSNYTYGNDTVTAVELGDRTLAENIFSNSPIEDVELAKHRVRKGSFFLQDLDTLPNFTSEGYGSIRRVYIYGEEDQIFSRDFQLWQINNYKPDKVYCVPSADHKIMISRVNELAQILQEVANSASDLLAVA

SEQ ID NO: 1457 - DNA, 789 bp, synthetic construct
  misc_feature 1..789: note = Round 6 (Selectivity)
  source 1..789: mol_type = other DNA
atggttagtgcgcattttattctgatccacagtgtttgccatggcgcctggctgtggtataaactgatcccgttattacagtctgcaggtcataacgttacggcgattgatctttgggctagcgggagtaatcctcgccaactggaacagattggcacatggcgccagtactcagaaccattgttcaccctgatcgaatcgattccgaacggtaagaaagtcattctggtaggagaagcgggtggcggcatcaatattgcactggccgcggagaagtatccggagaaagtgagcgccctcgtctttgtgaacgcacttatgcccgatatcgatcacagtccagcgttcgtggtaaagaaatatagcgaagttttcactgactggaaagattcgatcttcagcaattatacctacggtaacgacacggttaccgcggtggaattgggagatcgtactctggccgagaacatcttctccaattctccgattgaagatgtagaactggcgaaacatcgtgtccgcaaaggctccttttttctgcaagacttggataccctgccgaactttacgtcggaagggtatggttcaattcgtcgtgtgtatgtctacggcgaagaagaccagatctttagccgcgattttcagttatggcaaattaataattataagcctgataaagtgtactgtgtaccgagtgctgaccacaagattatgatcagccgcgtcaacgagctggcccagattctccaagaagttgcaaactctgcgagtgatcttcttgcagtggct

SEQ ID NO: 1458 - protein, 263 aa, synthetic construct
  REGION 1..263: note = Round 6 (Selectivity)
MVSAHFILIHSVCHGAWLWYKLIPLLQSAGHNVTAIDLWASGSNPRQLEQIGTWRQYSEPLFTLIESIPNGKKVILVGEAGGGINIALAAEKYPEKVSALVFVNALMPDIDHSPAFVVKKYSEVFTDWKDSIFSNYTYGNDTVTAVELGDRTLAENIFSNSPIEDVELAKHRVRKGSFFLQDLDTLPNFTSEGYGSIRRVYVYGEEDQIFSRDFQLWQINNYKPDKVYCVPSADHKIMISRVNELAQILQEVANSASDLLAVA

SEQ ID NO: 1459 - DNA, 789 bp, synthetic construct
  misc_feature 1..789: note = Round 6 (Selectivity)
  source 1..789: mol_type = other DNA
atggttagtgcgcattttatcctgatccacagtgtttgccatggcgcctggctgtggtataaactgatcccgttattacagtctgcaggtcataacgttacggcgattgatctttgggctagcgggagtaatcctcaccaactggaacagattggcacatgggagcagtactcagaaccattgttcaccctgatcgaatcgattccggaaggtaagaaagtcattctggtaggagaagcgggtggcggcatcaatattgcactggccgcggaggcctatccggagaaagtgagcgccctcgtctttgtgaacgcacttatgcccgatatcgatcacagtccagcgttcgtgtataagaaatatagcgaagttttcactgactggaaagattcgatcttcagcaattatacctacggtaacgacacggttaccgcggtggaattgggagatcgtactctggccgagaacatcttctccaattctccgattgaagatgtagaactggcgaaacatcgtgtccgcccgggctccttttttctgcaagacttggataccctgccgaactttacgtcggaagggtatggttcaattcgtcgtgtgtatgtttacggcgaagaagaccagatctttagccgcgattttcagttatggcaaattaataattataagcctgataaagtgtactgtgtaccgagtgctgaccacaagattatgatcagccgcgtcaacgagctggcccagattctccaagaagttgcaaactctgcgagtgatcttcttgcagtggct

SEQ ID NO: 1460 - protein, 263 aa, synthetic construct
  REGION 1..263: note = Round 6 (Selectivity)
MVSAHFILIHSVCHGAWLWYKLIPLLQSAGHNVTAIDLWASGSNPHQLEQIGTWEQYSEPLFTLIESIPEGKKVILVGEAGGGINIALAAEAYPEKVSALVFVNALMPDIDHSPAFVYKKYSEVFTDWKDSIFSNYTYGNDTVTAVELGDRTLAENIFSNSPIEDVELAKHRVRPGSFFLQDLDTLPNFTSEGYGSIRRVYVYGEEDQIFSRDFQLWQINNYKPDKVYCVPSADHKIMISRVNELAQILQEVANSASDLLAVA

SEQ ID NO: 1461 - DNA, 789 bp, synthetic construct
  misc_feature 1..789: note = Round 6 (Selectivity)
  source 1..789: mol_type = other DNA
atggttagtgcgcattttattctgatccacagtgtttgccatggcgcctggctgtggtataaactgatcccgttattacagtctgcaggtcataacgttacggcgattgatctttgggctagcgggagtaatcctcaccaactggaacagattggcacatgggagcagtactcagaaccattgttcaccctgatcgaatcgattccggaaggttgcaaagtcattctggtaggagaagcgggtggcggcatcaatattgcactggccgcggagaaatatccggagaaagtgagcgccctcgtctttgtgaacgcacttatgcccgatatcgatcacagtccagcgttcgtgtataagaaatatagcgaagttttcactgactggaaagattcgatcttcagcaattatacctacggtaacgacacggttaccgcggtggaattgggagatcgtactctggccgagaacatcttctccaattctccgattgaagatgtagaactggcgaaacatcgtgtccgcaagggctccttttttctgcaagacttggataccctgccgaactttacgtcggaagggtatggttcaattcgtcgtgtgtatgtttacggcgaagaagaccagatctttagccgcgattttcagttatggcaaattaataattataagcctgataaagtgtactgtgtaccgagtgctgaccacaagattatgatcagccgcgtcaacgagctggcccagattctccaagaagttgcaaactctgcgagtgatcttcttgcagtggct

SEQ ID NO: 1462 - protein, 263 aa, synthetic construct; identical to SEQ ID NO: 1394
  REGION 1..263: note = Round 6 (Selectivity)

SEQ ID NO: 1463 - DNA, 789 bp, synthetic construct
  misc_feature 1..789: note = Round 6 (Selectivity)
  source 1..789: mol_type = other DNA
atggttagtgcgcattttattctgatccacagtgtttgccatggcgcctggctgtggtataaactgatcccgttattacagtctgcaggtcataacgttacggcgattgatctttgggctagcgggagtaatcctcgccaactggaacagattggcacatgggagcagtactcagaaccattgttcaccctgatcgaatcgattccggaaggtaagaaagtcattctggtaggagaagcgggtggcggcatcaatattgcactggccgcggagaagtatccggagaaagtgagcgccctcgtctttgtgaacgcacttatgcccgatatcgatcacagtccagcgttcgtgtataagaaatatagcgaagttttcactgactggaaagattcgatcttcagcaattatacctacggtaacgacacggttaccgcggtggaattgggagatcgtactctggccgagaacatcttctccaattctccgattgaagatgtagaactggcgaaacatcgtgtccgcaaaggctccttttttctgcaagacttggataccctgccgaactttacgtcggaagggtatggttcaattcgtcgtgtgtatgtttacggcgaagaagaccagatctttagccgcgattttcagttatggcaaattaataattataagcctgataaagtgtactgtgtaccgagtgctgaccacaagattatgatcagccgcgtcaacgagctggcccagattctccaagaagttgcaaactctgcgcaagatcttcttggggtgggt

SEQ ID NO: 1464 - protein, 263 aa, synthetic construct
  REGION 1..263: note = Round 6 (Selectivity)
MVSAHFILIHSVCHGAWLWYKLIPLLQSAGHNVTAIDLWASGSNPRQLEQIGTWEQYSEPLFTLIESIPEGKKVILVGEAGGGINIALAAEKYPEKVSALVFVNALMPDIDHSPAFVYKKYSEVFTDWKDSIFSNYTYGNDTVTAVELGDRTLAENIFSNSPIEDVELAKHRVRKGSFFLQDLDTLPNFTSEGYGSIRRVYVYGEEDQIFSRDFQLWQINNYKPDKVYCVPSADHKIMISRVNELAQILQEVANSAQDLLGVG

SEQ ID NO: 1465 - DNA, 789 bp, synthetic construct
  misc_feature 1..789: note = Round 6 (Selectivity)
  source 1..789: mol_type = other DNA
atggttagtgcgcattttattctgatccacagtgtttgccatggcgcctggctgtggtataaactgatcccgttattacagtctgcaggtcataacgttacggcgattgatctttgggctagcgggagtaatcctcgccaactggaacagattggcacatgggagcagtactcagaaccattgttcaccctgatcgaatcgattccggaaggtaagaaagtcattctggtaggagaagcgggtggcggcatcaatattgcactggccgcggagaaatatccggagaaagtgagcgccctcgtctttgtgaacgcacttatgcccgatatcgatcacagtccagcgttcgtgtataagaaatatagcgaagttttcactgactggaaagattcgatcttcagcaattatacctacggtaacgacacggttaccgcgatcgaattgggagatcgtactctggccgagaacatcttctccaattctccgattgaagatgtagaactggcgaaacatcgtgtccgcaagggctccttttttctgcaagacttggataccctgccgaactttacgtcggaagggtatggttcaattcgtcgtgtgtatgtttacggcgaagaagaccagatctttagccgcgattttcagttatggcaaattaataattataagcctgataaagtgtactgtgtaccgagtgctgaccacaagattatgatcagccgcgtcaacgagctggcccagattctccaagaagttgcaaactctgcgcaagatcttcttgcggtgagt

SEQ ID NO: 1466 - protein, 263 aa, synthetic construct
  REGION 1..263: note = Round 6 (Selectivity)
MVSAHFILIHSVCHGAWLWYKLIPLLQSAGHNVTAIDLWASGSNPRQLEQIGTWEQYSEPLFTLIESIPEGKKVILVGEAGGGINIALAAEKYPEKVSALVFVNALMPDIDHSPAFVYKKYSEVFTDWKDSIFSNYTYGNDTVTAIELGDRTLAENIFSNSPIEDVELAKHRVRKGSFFLQDLDTLPNFTSEGYGSIRRVYVYGEEDQIFSRDFQLWQINNYKPDKVYCVPSADHKIMISRVNELAQILQEVANSAQDLLAVS

SEQ ID NO: 1467 - DNA, 789 bp, synthetic construct
  misc_feature 1..789: note = Round 6 (Selectivity)
  source 1..789: mol_type = other DNA
atggttagtgcgcattttattctgatccacagtgtttgccatggcgcctggctgtggtataaactgatcccgttattacagtctgcaggtcataacgttacggcgattgatctttgggctagcgggagtaatcctcaccaactggaacagattggcacatggcgccagtactcagaaccattgttcaccctgatcgaatcgattccggaaggtaagaaagtcattctggtaggagaagcgggtggcggcatcaatattgcactggccgcggagaagtatccggagaaagtgagcgccctcgtctttgtgaacgcacttatgcccgatatcgatcacagtccagcgttcgtgtataagaaatatagcgaagttttcactgactggaaagattcgatcttcagcaattatacctacggtaacgacacggttaccgcgatcgaattgggagatcgtactctggccgagaacatcttctccaattctccgattgaagatgtagaactggcgaaacatcgtgtccgcaaaggctccttttttctgcaagacttggataccctgccgaactttacgtcggaagggtatggttcaattcgtcgtgtgtatgtctacggcgaagaagaccagatctttagccgcgattttcagttatggcaaattaataattataagcctgataaagtgtactgtgtaccgagtgctgaccacaagattatgatcagccgcgtcaacgagctggcccagattctccaagaagttgcaaactctgcgagtgatcttcttgcagtggct

SEQ ID NO: 1468 - protein, 263 aa, synthetic construct
  REGION 1..263: note = Round 6 (Selectivity)
MVSAHFILIHSVCHGAWLWYKLIPLLQSAGHNVTAIDLWASGSNPHQLEQIGTWRQYSEPLFTLIESIPEGKKVILVGEAGGGINIALAAEKYPEKVSALVFVNALMPDIDHSPAFVYKKYSEVFTDWKDSIFSNYTYGNDTVTAIELGDRTLAENIFSNSPIEDVELAKHRVRKGSFFLQDLDTLPNFTSEGYGSIRRVYVYGEEDQIFSRDFQLWQINNYKPDKVYCVPSADHKIMISRVNELAQILQEVANSASDLLAVA

SEQ ID NO: 1469 - DNA, 789 bp, synthetic construct
  misc_feature 1..789: note = Round 6 (Selectivity)
  source 1..789: mol_type = other DNA
atggttagtgcgcattttattctgatccacagtgtttgccatggcgcctggctgtggtataaactgatcccgttattacagtctgcaggtcataacgttacggcgattgatctttgggctagcgggagtaatcctcgccaactggaacagattggcacatgggagcagtactcagaaccattgttcaccctgatcgaatcgattccggaaggtaagaaagtcattctggtaggagaagcgggtggcggcatcaatattgcactggccgcggaggcctatccggagaaagtgagcgccctcgtctttgtgaacgcacttatgcccgatatcgatcacagtccagcgttcgtggtaaagaaatatagcgaagttttcactgactggaaagattcgatcttcagcaattatacctacggtaacgacacggttaccgcggtggaattgggagatcgtactctggccgagaacatcttctccaattctccgattgaagatgtagaactggcgaaacatcgtgtccgcaagggctccttttttctgcaagacttggataccctgccgaactttacgtcggaagggtatggttcaattcgtcgtgtgtatgtctacggcgaagaagaccagatctttagccgcgattttcagttatggcaaattaataattataagcctgataaagtgtactgtgtaccgagtgctgaccacaagattatgatcagccgcgtcaacgagctggcccagattctccaagaagttgcaaactctgcgagcgatcttcttgcggtggcg

SEQ ID NO: 1470 - protein, 263 aa, synthetic construct
  REGION 1..263: note = Round 6 (Selectivity)
MVSAHFILIHSVCHGAWLWYKLIPLLQSAGHNVTAIDLWASGSNPRQLEQIGTWEQYSEPLFTLIESIPEGKKVILVGEAGGGINIALAAEAYPEKVSALVFVNALMPDIDHSPAFVVKKYSEVFTDWKDSIFSNYTYGNDTVTAVELGDRTLAENIFSNSPIEDVELAKHRVRKGSFFLQDLDTLPNFTSEGYGSIRRVYVYGEEDQIFSRDFQLWQINNYKPDKVYCVPSADHKIMISRVNELAQILQEVANSASDLLAVA

SEQ ID NO: 1471 - DNA, 789 bp, synthetic construct
  misc_feature 1..789: note = Round 6 (Selectivity)
  source 1..789: mol_type = other DNA
atggttagtgcgcattttattctgatccacagtgtttgccatggcgcctggctgtggtataaactgatcccgttattaggttctgcaggtcataacgttacggcgattgatctttgggctagcgggagtaatcctcaccaactggaacagattggcacatgggagcagtactcagaaccattgttcaccctgatcgaatcgattccggaaggtaagaaagtcattctggtaggagaagcgggtggcggcatcaatattgcactggccgcggagaaatatccggagaaagtgagcgccctcgtctttgtgaacgcacttatgcccgatatcgatcacagtccagcgttcgtgtacaagaaatatagcgaagttttcactgactggaaagattcgatcttcagcaattatacctacggtaacgacacggttaccgcgatcgaattgggagatcgtactctggccgagaacatctattccaattctccgattgaagatgtagaactggcgaaacatcgtgtccgcaagggctccttttttctgcaagacttggataccctgccgaactttacgtcggaagggtatggttcaattcgtcgtgtgtatatctacggcgaagaagaccagatctttagccgcgattttcagttatggcaaattaataattataagcctgataaagtgtactgtgtaccgagtgctgaccacaagattatgatcagccgcgtcaacgagctggcccagattctccaagaagttgcaaactctgcgagtgatcttcttgcagtggct

SEQ ID NO: 1472 - protein, 263 aa, synthetic construct
  REGION 1..263: note = Round 6 (Selectivity)
MVSAHFILIHSVCHGAWLWYKLIPLLGSAGHNVTAIDLWASGSNPHQLEQIGTWEQYSEPLFTLIESIPEGKKVILVGEAGGGINIALAAEKYPEKVSALVFVNALMPDIDHSPAFVYKKYSEVFTDWKDSIFSNYTYGNDTVTAIELGDRTLAENIYSNSPIEDVELAKHRVRKGSFFLQDLDTLPNFTSEGYGSIRRVYIYGEEDQIFSRDFQLWQINNYKPDKVYCVPSADHKIMISRVNELAQILQEVANSASDLLAVA

SEQ ID NO: 1473 - DNA, 789 bp, synthetic construct
  misc_feature 1..789: note = Round 6 (Selectivity)
  source 1..789: mol_type = other DNA
atggttagtgcgcattttattctgatccacagtgtttgccatggcgcctggctgtggtataaactgatcccgttattacagtctgcaggtcataacgttacggcgattgatctttgggctagcgggagtaatcctcaccaactggaacagattggcacatgggagcagtactcagaaccattgttcaccctgatcgaatcgattccggaaggtaagaaagtcattctggtaggagaagcgggtggcggcatcaatattgcactggccgcggagaaatatccggagaaagtgagcgccctcgtctttgtgaacgcacttatgcccgatatcgatcacagtccagcgttcgtgtataagaaatatagcgaagttttcactgactggaaagattcgatcttcagcaattatacctacggtaacgacacggttaccgcgatcgaattgggagatcgtactctggccgagaacatcttctccaattctccgattgaagatgtagaactggcgaaacatcgtgtccgcaagggctccttttttctgcaagacttggataccctgccgaactttacgtcggaagggtatggttcaattcgtcgtgtgtatgtttacggcgaagaagaccagatctttagccgcgattttcagttatggcaaattaataattataagcctgataaagtgtactgtgtaccgagtgctgaccacaagattatgatcagccgcgtcaacgagctggcccagattctccaagaagttgcaaactctgcgcaagatcttcttgcggtgatc

SEQ ID NO: 1474 - protein, 263 aa, synthetic construct
  REGION 1..263: note = Round 6 (Selectivity)
MVSAHFILIHSVCHGAWLWYKLIPLLQSAGHNVTAIDLWASGSNPHQLEQIGTWEQYSEPLFTLIESIPEGKKVILVGEAGGGINIALAAEKYPEKVSALVFVNALMPDIDHSPAFVYKKYSEVFTDWKDSIFSNYTYGNDTVTAIELGDRTLAENIFSNSPIEDVELAKHRVRKGSFFLQDLDTLPNFTSEGYGSIRRVYVYGEEDQIFSRDFQLWQINNYKPDKVYCVPSADHKIMISRVNELAQILQEVANSAQDLLAVI

SEQ ID NO: 1475 - DNA, 789 bp, synthetic construct
  misc_feature 1..789: note = Round 6 (Selectivity)
  source 1..789: mol_type = other DNA
atggttagtgcgcattttattctgatccacagtgtttgccatggcgcctggctgtggtataaactgatcccgttattaggttctgcaggtcataacgttacggcgattgatctttgggctagcgggagtaatcctcaccaactggaacagattggcacatgggagcagtactcagaaccattgttcaccctgatcgaatcgattccggaaggttgcaaagtcattctggtaggagaagcgggtggcggcatcaatattgcactggccgcggagaaatatccggagaaagtgagcgccctcgtctttgtgaacgcacttatgcccgatatcgatcacagtccagcgttcgtgtataagaaatatagcgaagttttcactgactggaaagattcgatcttcagcaattatacctacggtaacgacacggttaccgcggtcgaattgggagatcgtactctggccgagaacatcttctccaattctccgattgaagatgtagaactggcgaaacatcgtgtccgcaaaggctccttttttctgcaagacttggataccctgccgaactttacgtcggaagggtatggttcaattcgtcgtgtgtatgtttacggcgaagaagaccagatctttagccgcgattttcagttatggcaaattaataattataagcctgataaagtgtactgtgtaccgagtgctgaccacaagattatgatcagccgcgtcaacgagctggcccagattctccaagaagttgcaaactctgcgagtgatcttcttgcagtggct

SEQ ID NO: 1476 - protein, 263 aa, synthetic construct
  REGION 1..263: note = Round 6 (Selectivity)
MVSAHFILIHSVCHGAWLWYKLIPLLGSAGHNVTAIDLWASGSNPHQLEQIGTWEQYSEPLFTLIESIPEGCKVILVGEAGGGINIALAAEKYPEKVSALVFVNALMPDIDHSPAFVYKKYSEVFTDWKDSIFSNYTYGNDTVTAVELGDRTLAENIFSNSPIEDVELAKHRVRKGSFFLQDLDTLPNFTSEGYGSIRRVYVYGEEDQIFSRDFQLWQINNYKPDKVYCVPSADHKIMISRVNELAQILQEVANSASDLLAVA

SEQ ID NO: 1477 - DNA, 789 bp, synthetic construct
  misc_feature 1..789: note = Round 6 (Selectivity)
  source 1..789: mol_type = other DNA
atggttagtgcgcattttattctgatccacagtgtttgccatggcgcctggctgtggtataaactgatcccgttattacagtctgtaggtcataacgttacggcgattgatctttgggctagcgggagtaatcctcgccaactggaacagattggcacatgggagcagtactcagaaccattgttcaccctgatcgaatcgattccgaacggtaagaaagtcattctggtaggagaagcgggtggcggcatcaatattgcactggccgcggagaagtatccggagaaagtgagcgccctcgtctttgtgaacgcacttatgcccgatatcgatcacagtccagcgttcgtggtaaagaaatatagcgaagttttcactgactggaaagattcgatcttcagcaattatacctacggtaacgacacggttaccgcggtcgaattgggagatcgtactctggccgagaacatcttttccaattctccgattgaagatgtagaactggcgaaacatcgtgtccgcaaaggctccttttttctgcaagacttggataccctgccgaactttacgtcggaagggtatggttcaattcgtcgtgtgtatgtttacggcgaagaagaccagatctttagccgcgattttcagttatggcaaattaataattataagcctgataaagtgtactgtgtaccgagtgctgaccacaagattatgatcagccgcgtcaacgagctggcccagattctccaagaagttgcaaactctgcgagtgatcttcttgcagtggct

SEQ ID NO: 1478 - protein, 263 aa, synthetic construct
  REGION 1..263: note = Round 6 (Selectivity)
MVSAHFILIHSVCHGAWLWYKLIPLLQSVGHNVTAIDLWASGSNPRQLEQIGTWEQYSEPLFTLIESIPNGKKVILVGEAGGGINIALAAEKYPEKVSALVFVNALMPDIDHSPAFVVKKYSEVFTDWKDSIFSNYTYGNDTVTAVELGDRTLAENIFSNSPIEDVELAKHRVRKGSFFLQDLDTLPNFTSEGYGSIRRVYVYGEEDQIFSRDFQLWQINNYKPDKVYCVPSADHKIMISRVNELAQILQEVANSASDLLAVA

SEQ ID NO: 1479 - DNA, 789 bp, synthetic construct
  misc_feature 1..789: note = Round 6 (Selectivity)
  source 1..789: mol_type = other DNA
atggttagtgcgcattttattctgatccacagtgtttgccatggcgcctggctgtggtataaactgatcccgttattacagtctgcaggtcataacgttacggcgattgatctttgggctagcgggagtaatcctcgccaactggaacagattggcacatgggagcagtactcagaaccattgttcaccctgatcgaatcgattccggaaggtaagaaagtcattctggtaggagaagcgggtggcggcatcaatattgcactggccgcggagaaatatccggagaaagtgagcgccctcgtctttgtgaacgcacttatgcccgatatcgatcacagtccagcgttcgtgtataagaaatatagcgaagttttcactgactggaaagattcgatcttcagcaattatacctacggtaacgacacggttaccgcggtggaattgggagatcgtactctggccgagaacatcttctccaattctccgattgaagatgtagaactggcgaaacatcgtgtccgcaaaggctccttttttctgcaagacttggataccctgccgaattttacgtcggtggggtatggttcaattcgtcgtgtgtatgtctacggcgaagaagaccagatctttagccgcgattttcagttatggcaaattaataattataagcctgataaagtgtactgtgtaccgagtgctgaccacaagattatgatcagccgcgtcaacgagctggcccagattctccaagaagttgcaaactctgcgcaagatcttcttggggtggcg

SEQ ID NO: 1480 - protein, 263 aa, synthetic construct
  REGION 1..263: note = Round 6 (Selectivity)
MVSAHFILIHSVCHGAWLWYKLIPLLQSAGHNVTAIDLWASGSNPRQLEQIGTWEQYSEPLFTLIESIPEGKKVILVGEAGGGINIALAAEKYPEKVSALVFVNALMPDIDHSPAFVYKKYSEVFTDWKDSIFSNYTYGNDTVTAVELGDRTLAENIFSNSPIEDVELAKHRVRKGSFFLQDLDTLPNFTSVGYGSIRRVYVYGEEDQIFSRDFQLWQINNYKPDKVYCVPSADHKIMISRVNELAQILQEVANSAQDLLGVA

SEQ ID NO: 1481 - DNA, 789 bp, synthetic construct
  misc_feature 1..789: note = Round 6 (Selectivity)
  source 1..789: mol_type = other DNA
atggttagtgcgcattttatcctgatccacagtgtttgccatggcgcctggctgtggtataaactgatcccgttattaggttctgcaggtcataacgttacggcgattgatctttgggctagcgggagtaatcctcaccaactggaacagattggcacatgggagcagtactcagaaccattgttcaccctgatcgaatcgattccggaaggtaagaaagtcattctggtaggagaagcgggtggcggcatcaatattgcactggccgcggagaaatatccggagaaagtgagcgccctcgtctttgtgaacgcacttatgcccgatatcgatcacagtccagcgttcgtgtataagaaatatagcgaagttttcactgactggaaagattcgatcttcagcaattatacctacggtaacgacacggttaccgcggtggaattgggagatcgtactctggccgagaacatcttctccaattctccgattgaagatgtagaactggcgaaacatcgtgtccgcccgggctccttttttctgcaagacttggataccctgccgaactttacgtcggaagggtatggttcaattcgtcgtgtgtatgtttacggcgaagaagaccagatctttagccgcgattttcagttatggcaaattaataattataagcctgataaagtgtactgtgtaccgagtgctgaccacaagattatgatcagccgcgtcaacgagctggcccagattctccaagaagttgcaaactctgcgagtgatcttcttgcagtggct

SEQ ID NO: 1482 - protein, 263 aa, synthetic construct
  REGION 1..263: note = Round 6 (Selectivity)
MVSAHFILIHSVCHGAWLWYKLIPLLGSAGHNVTAIDLWASGSNPHQLEQIGTWEQYSEPLFTLIESIPEGKKVILVGEAGGGINIALAAEKYPEKVSALVFVNALMPDIDHSPAFVYKKYSEVFTDWKDSIFSNYTYGNDTVTAVELGDRTLAENIFSNSPIEDVELAKHRVRPGSFFLQDLDTLPNFTSEGYGSIRRVYVYGEEDQIFSRDFQLWQINNYKPDKVYCVPSADHKIMISRVNELAQILQEVANSASDLLAVA

SEQ ID NO: 1483 - DNA, 789 bp, synthetic construct
  misc_feature 1..789: note = Round 6 (Selectivity)
  source 1..789: mol_type = other DNA
atggttagtgcgcattttattctgatccacagtgtttgccatggcgcctggctgtggtataaactgatcccgttattacagtctgcaggtcataacgttacggcgattgatcttgtggctagcgggagtaatcctcgccaactggaacagattggcacatgggagcagtactcagaaccattgttcaccctgatcgaatcgattccggaaggtaagaaagtcattctggtaggagaagcgggtggcggcatcaatattgcactggccgcggagaaatatccggagaaagtgagcgccctcgtctttgtgaacgcacttatgcccgatatcgatcacagtccagcgttcgtgtataagaaatatagcgaagttttcactgactggaaagattcgatcttcagcaattatacctacggtaacgacacggttaccgcggtggaattgggagatcgtactctggccgagaacatcttctccaattctccgattgaagatgtagaactggcgaaacatcgtgtccgcaaaggctccttttttctgcaagacttggataccctgccgaactttacgtcggaagggtatggttcaattcgtcgtgtgtatgtttacggcgaagaagaccagatctttagccgcgattttcagttatggcaaattaataattataagcctgataaagtgtactgtgtaccgagtgctgaccacaagattatgatcagccgcgtcaacgagctggcccagattctccaagaagttgcaaactctgcgagtgatcttcttgcagtggct

SEQ ID NO: 1484 - protein, 263 aa, synthetic construct; identical to SEQ ID NO: 1380
  REGION 1..263: note = Round 6 (Selectivity)

1. An engineered nitroaldolase polypeptide comprising a polypeptide sequence comprising at least 80%, 85%, 86%, 87%, 88%, 89%, 90%, 91%, 92%, 93%, 94%, 95%, 96%, 97%, 98%, or 99% sequence identity to SEQ ID NOs: 2, 24, 496, 860, 1120, and/or 1348, or a functional fragment thereof, wherein said engineered nitroaldolase polypeptide comprises at least one substitution or substitution set in said polypeptide sequence, and wherein the amino acid positions of said polypeptide sequence are numbered with reference to SEQ ID NOs: 2, 24, 496, 860, 1120, and/or 1348.

2. The engineered nitroaldolase polypeptide of claim 1, wherein said polypeptide sequence comprises at least 80%, 85%, 86%, 87%, 88%, 89%, 90%, 91%, 92%, 93%, 94%, 95%, 96%, 97%, 98%, or 99% sequence identity to SEQ ID NO: 2, wherein said engineered nitroaldolase polypeptide comprises at least one substitution or substitution set in said polypeptide sequence at one or more positions selected from 11, 7/9, 7/9/33/68/72/158, 7/9/33/72/175/197/230, 7/9/33/72/230, 7/9/68/72/197, 7/9/158/175, 7/9/175, 7/9/197, 7/33, 7/68/72/175, 7/72, 7/72/97/175/230, 9, 9/11/33/72/197/230, 9/33/68/158/197, 9/33/72/230, 9/33/97/230, 9/68/72, 9/97/175/202/218, 9/175, 9/202, 11, 13, 14/33/68/72/97, 18, 18/33/68/97/158/175/239, 18/33/72/97/158/175, 18/33/72/97/158/239, 18/33/72/97/175/202, 18/33/72/175/202/237/239, 18/33/72/197/237, 18/68/72, 18/68/72/158/175/237/239, 18/68/72/175/202/239, 18/68/72/239, 18/68/175/223/237/239, 18/68/239, 18/72/97/175/237/239, 18/72/175/197, 18/72/237, 18/72/239, 18/97/175/237/239, 18/97/223/237/239, 18/175, 18/197/239, 18/239, 20/124, 33/68/72, 33/68/72/175/230, 33/68/223/239, 33/72, 33/72/97/197, 33/72/175, 33/175, 39, 44/97, 52, 68/72, 68/72/97, 68/72/97/197, 68/72/197, 68/72/197/239, 68/97/175, 68/97/175/197/223, 72/97/158/223/237, 72/175/197, 97/158/175/197, 97/175, 103, 121, 122, 124, 125, 128, 133, 148, 175, 197, and 197/202, and wherein the amino acid positions of said polypeptide sequence are numbered with reference to SEQ ID NO: 2.

3. The engineered nitroaldolase polypeptide of claim 1, wherein said polypeptide sequence comprises at least 80%, 85%, 86%, 87%, 88%, 89%, 90%, 91%, 92%, 93%, 94%, 95%, 96%, 97%, 98%, or 99% sequence identity to SEQ ID NO: 2, wherein said engineered nitroaldolase polypeptide comprises at least one substitution or substitution set in said polypeptide sequence at one or more positions selected from 7/11/33/72/97, 7/11/33/97, 7/11/72, 7/11/158, 7/11/237, 7/33/72/97/158/175/197/237/239, 9/11/33, 9/11/33/72, 9/11/72, 9/33/68/97/237/239, 9/72/97/158/237/239, 9/218/239, 10, 11, 12, 13, 14, 18, 33/68/72/97/237/239, 33/72/158/239, 39, 40, 41, 48, 49, 51, 54, 54/126, 57, 68/175/239, 82, 84, 85, 86, 103, 104, 105, 107, 115, 117, 119, 119/120, 120, 122, 123, 124, 127, 130, 131, 133, 134, 137/145, 144, 145, 146, 147, 148, 149, 150, 152, 157, 158, 159, 169, 173, 174, 175, 180, 181, 183, 203, 204, 208, 209, 210, 215, 218, 236, and 237, and wherein the amino acid positions of said polypeptide sequence are numbered with reference to SEQ ID NO: 2.

4. The engineered nitroaldolase polypeptide of claim 1, wherein said polypeptide sequence comprises at least 80%, 85%, 86%, 87%, 88%, 89%, 90%, 91%, 92%, 93%, 94%, 95%, 96%, 97%, 98%, or 99% sequence identity to SEQ ID NO: 24, wherein said engineered nitroaldolase polypeptide comprises at least one substitution or substitution set in said polypeptide sequence at one or more positions selected from 9/39/122/157, 18, 18/33/39/230, 18/33/175, 18/39/44/118, 18/175, 20, 33/39, 33/39/44/118/121, 33/39/44/121, 33/39/44/152, 33/39/44/175, 33/39/44/197, 33/39/44/210/230, 33/39/118/121/175, 33/39/121/175, 33/39/197/210, 33/39/210, 33/39/210/230, 33/118/121, 33/118/121/175, 39, 39/44/103, 39/44/118, 39/44/152/230, 39/44/175/197/230, 39/103, 39/103/125, 39/103/125/127/146, 39/103/125/127/146/150, 39/103/125/146, 39/103/127/150, 39/103/150, 39/118/121, 39/197, 39/197/210, 43, 44/103, 81, 103, 103/125/127, 103/125/146, 103/127, 103/150, 118/121, 118/121/175, 118/121/197, 121, 152, 152/197, 154, 159, 163, 175, 210, 232, and 238, and wherein the amino acid positions of said polypeptide sequence are numbered with reference to SEQ ID NO: 24.

5. The engineered nitroaldolase polypeptide of claim 1, wherein said polypeptide sequence comprises at least 80%, 85%, 86%, 87%, 88%, 89%, 90%, 91%, 92%, 93%, 94%, 95%, 96%, 97%, 98%, or 99% identity to SEQ ID NO: 24, wherein said engineered nitroaldolase polypeptide comprises at least one substitution or substitution set in said polypeptide sequence at one or more positions selected from 7, 9/13, 9/13/39, 9/13/39/68/72/239, 9/13/39/68/239, 9/13/39/72/122, 9/13/39/97/239, 9/13/68/72/97/239, 9/13/68/97/134/239, 9/13/68/97/239, 9/13/72, 9/13/134, 11, 12/42/125/127, 12/103, 12/103/150, 13, 13/39, 13/39/68, 13/39/68/72/97, 13/39/72/97/122/134/223, 13/39/97/239, 13/39/239, 13/68, 13/68/72/97/122/239, 16, 18/33/39/44/118/121/175/197/210, 18/33/39/44/121, 18/33/39/112/118/121/197, 18/33/39/121, 18/33/39/121/175, 18/33/39/121/175/197, 18/33/39/121/175/210, 18/33/39/121/210, 18/33/118/121, 18/33/121, 18/33/121/197, 18/33/121/210/230, 18/39/44/118/121/230, 18/39/44/121/175/210, 18/39/118/121, 18/39/118/121/210, 18/39/121/175, 18/39/121/175/210, 18/39/121/197/210, 18/118/121, 18/118/121/175, 18/118/121/210, 18/118/121/230, 18/121, 18/121/175, 18/121/210, 18/121/230, 20, 21, 33/39/44/118/121, 33/39/44/118/121/210/230, 33/39/44/121, 33/39/44/121/152, 33/39/44/121/175/210, 33/39/44/121/230, 33/39/73/121/197, 33/39/118/121/175, 33/39/118/121/175/230, 33/39/121, 33/39/121/175, 33/39/121/210/230, 33/118/121, 33/118/121/175, 33/118/121/197, 33/121, 33/121/230, 37/91, 39/44/118/121/175/210, 39/68/72/239, 39/118/121, 39/118/121/210, 39/121, 39/121/210/230, 43, 44, 76, 79, 101, 118/121, 118/121/175, 118/121/197, 121, 121/175/230, 121/210, 148, 153, 159, 161, 172, 200, 207, 233, 245, and 248, and wherein the amino acid positions of said polypeptide sequence are numbered with reference to SEQ ID NO: 24.

6. The engineered nitroaldolase polypeptide of claim 1, wherein said polypeptide sequence comprises at least 80%, 85%, 86%, 87%, 88%, 89%, 90%, 91%, 92%, 93%, 94%, 95%, 96%, 97%, 98%, or 99% sequence identity to SEQ ID NO: 496, wherein said engineered nitroaldolase polypeptide comprises at least one substitution or substitution set in said polypeptide sequence at one or more positions selected from 43/103, 43/103/172/238, 43/103/238/241, 43/238, 81/232, 103, 103/159/238, 103/194/238, 103/238, 122, 232, 238, and 238/241, and wherein the amino acid positions of said polypeptide sequence are numbered with reference to SEQ ID NO: 496.

7. The engineered nitroaldolase polypeptide of claim 1, wherein said polypeptide sequence comprises at least 80%, 85%, 86%, 87%, 88%, 89%, 90%, 91%, 92%, 93%, 94%, 95%, 96%, 97%, 98%, or 99% sequence identity to SEQ ID NO: 496, wherein said engineered nitroaldolase polypeptide comprises at least one substitution or substitution set in said polypeptide sequence at one or more positions selected from 12, 43, 43/47/103, 43/47/103/232, 43/103, 43/103/121/172/241, 43/103/172, 43/103/172/238, 43/103/238, 43/103/238/241, 43/121, 43/194/238, 43/238, 44/103/121/238, 44/103/238, 44/103/238/241, 44/121/238/241, 47/103, 63, 103, 103/121, 103/121/172/238, 103/159/238, 103/172/238, 103/194/238, 103/238, 122, 131, 146, 178, 180, and 221, and wherein the amino acid positions of said polypeptide sequence are numbered with reference to SEQ ID NO: 496.

8. The engineered nitroaldolase polypeptide of claim 1, wherein said polypeptide sequence comprises at least 80%, 85%, 86%, 87%, 88%, 89%, 90%, 91%, 92%, 93%, 94%, 95%, 96%, 97%, 98%, or 99% sequence identity to SEQ ID NO: 860, wherein said engineered nitroaldolase polypeptide comprises at least one substitution or substitution set in said polypeptide sequence at one or more positions selected from 12, 12/43/63/103/146/180/232/241, 12/43/63/103/146/241, 12/43/81/103/241, 12/43/81/146/232/241, 12/43/81/180/241, 12/43/81/232/241, 12/43/81/241, 12/43/103, 12/43/103/146/180/232/241, 12/43/103/146/180/241, 12/43/103/180/241, 12/43/103/241, 12/43/146/180/232/241, 12/43/180/241, 12/63/81/103/241, 12/81, 12/81/180/241, 12/103/146/241, 12/103/180/241, 12/146, 12/146/180/241, 12/180/232/241, 12/241, 18, 43/81/232/241, 43/103/146/180, 43/103/180/241, 43/103/241, 43/180/232, 43/232/241, 63/103/180/232, 78, 81, 81/103/146, 81/146/180/241, 81/146/241, 81/180/241, 84, 103, 103/146, 103/146/180, 103/146/180/241, 103/180, 103/180/241, 103/261, 144, 145, 146/180/232, 146/180/241, 146/241, 150, 166, 172, 180/232, 232/241, and 241, and wherein the amino acid positions of said polypeptide sequence are numbered with reference to SEQ ID NO: 860.

9. The engineered nitroaldolase polypeptide of claim 1, wherein said polypeptide sequence comprises at least 80%, 85%, 86%, 87%, 88%, 89%, 90%, 91%, 92%, 93%, 94%, 95%, 96%, 97%, 98%, or 99% sequence identity to SEQ ID NO: 860, wherein said engineered nitroaldolase polypeptide comprises at least one substitution or substitution set in said polypeptide sequence at one or more positions selected from 9, 12, 12/43/63/103/146/180/232/241, 12/43/63/103/146/241, 12/43/103/146/180/232/241, 12/43/103/146/180/241, 12/43/103/146/232/241, 12/43/103/146/241, 12/43/103/180/241, 12/43/146/180/232/241, 12/43/146/241, 12/43/180/232, 12/43/180/241, 12/63/103/146/232/241, 12/103/146/241, 12/103/180/241, 12/146, 12/146/180/241, 12/146/232/241, 12/146/241, 12/180, 12/180/232/241, 12/180/241, 12/241, 18, 43/63/103/180/232/241, 43/103/146/180, 43/103/180, 43/103/180/232/241, 43/103/180/241, 43/180/232, 63/103/180/232, 103, 103/146/180, 103/146/180/241, 103/180, 103/180/241, 103/241, 118, 119, 122, 144, 145, 146/180/241, 154, 160, 172, 180/232, 180/232/241, 180/241, 208, 211, and 212, and wherein the amino acid positions of said polypeptide sequence are numbered with reference to SEQ ID NO: 860.

10. The engineered nitroaldolase polypeptide of claim 1, wherein said polypeptide sequence comprises at least 80%, 85%, 86%, 87%, 88%, 89%, 90%, 91%, 92%, 93%, 94%, 95%, 96%, 97%, 98%, or 99% sequence identity to SEQ ID NO: 1120, wherein said engineered nitroaldolase polypeptide comprises at least one substitution or substitution set in said polypeptide sequence at one or more positions selected from 3, 7, 7/158, 7/158/175, 7/158/197/202, 27/43/115/172, 27/43/172, 29, 32, 43/110/115/172, 44, 46, 48/172, 55, 59, 67, 71, 72, 73, 94/103/118/146, 103, 103/144/146/172/180, 103/146/154/172/180/232, 103/154, 118, 118/144/215, 118/172/180, 137, 142, 146, 146/154, 154, 158, 172/190, 184, 198, 205, 216, 223, 226, 229, 247, 261, and 263, and wherein the amino acid positions of said polypeptide sequence are numbered with reference to SEQ ID NO: 1120.

11. The engineered nitroaldolase polypeptide of claim 1, wherein said polypeptide sequence comprises at least 80%, 85%, 86%, 87%, 88%, 89%, 90%, 91%, 92%, 93%, 94%, 95%, 96%, 97%, 98%, or 99% sequence identity to SEQ ID NO: 1120, wherein said engineered nitroaldolase polypeptide comprises at least one substitution or substitution set in said polypeptide sequence at one or more positions selected from 73, 80, 103/146/209, 103/172/209, 118/119/172/209, 135, 144/209/232, 172/180/209, 181, and 223, and wherein the amino acid positions of said polypeptide sequence are numbered with reference to SEQ ID NO: 1120.

12. The engineered nitroaldolase polypeptide of claim 1, wherein said polypeptide sequence comprises at least 80%, 85%, 86%, 87%, 88%, 89%, 90%, 91%, 92%, 93%, 94%, 95%, 96%, 97%, 98%, or 99% sequence identity to SEQ ID NO: 1348, wherein said engineered nitroaldolase polypeptide comprises at least one substitution or substitution set in said polypeptide sequence at one or more positions selected from 2, 7/46, 39, 46, 46/55, 46/55/72, 46/55/92, 46/55/118, 46/55/226/257/263, 46/55/263, 46/70, 46/70/92/118/261/263, 46/70/175/263, 46/72, 46/118, 55/257/261, 55/261/263, 55/263, 105, 118, 118/226/261/263, and 263, and wherein the amino acid positions of said polypeptide sequence are numbered with reference to SEQ ID NO: 1348.

13. The engineered nitroaldolase polypeptide of claim 1, wherein said polypeptide sequence comprises at least 80%, 85%, 86%, 87%, 88%, 89%, 90%, 91%, 92%, 93%, 94%, 95%, 96%, 97%, 98%, or 99% sequence identity to SEQ ID NO: 1348, wherein said engineered nitroaldolase polypeptide comprises at least one substitution or substitution set in said polypeptide sequence at one or more positions selected from 2, 7/46, 7/46/175, 22/46/55/118, 27/46/72, 27/46/146/158/202, 27/46/175, 27/118, 29/70/118, 39, 46, 46/55, 46/55/59/261/263, 46/55/72, 46/55/92, 46/55/118, 46/55/118/263, 46/55/146, 46/55/146/202, 46/55/226/257/263, 46/55/263, 46/70, 46/70/92/118/261/263, 46/70/175/263, 46/72, 46/92, 46/92/175, 46/118, 46/146, 46/146/257/263, 55/70/118, 55/257/261, 55/257/263, 55/261/263, 55/263, 70, 92/118, 105, 118, 118/226/261/263, 146/257/263, 146/261/263, 192/257/261, 202, 257/261/263, 261/263, and 263, and wherein the amino acid positions of said polypeptide sequence are numbered with reference to SEQ ID NO: 1348.

14. The engineered nitroaldolase polypeptide of claim 1, wherein said engineered nitroaldolase polypeptide comprises an amino acid sequence with at least 80% sequence identity to any even-numbered sequence set forth in SEQ ID NOs: 4-1484.

15. The engineered nitroaldolase polypeptide of claim 1, wherein said engineered nitroaldolase polypeptide comprises a polypeptide sequence set forth in the even numbered sequences of SEQ ID NOs: 4-1484.

16. The engineered nitroaldolase polypeptide of claim 1, wherein said engineered nitroaldolase polypeptide comprises a polypeptide sequence that exhibits at least one improved property compared to the engineered nitroaldolase polypeptide of SEQ ID NO: 2.

17. The engineered nitroaldolase polypeptide of claim 16, wherein said improved property comprises improved production of compound (3)

[chemical structure]

18. The engineered nitroaldolase polypeptide of claim 16, wherein said improved property comprises improved stereoselectivity towards the (S)-product of at least 30%, 40%, 50%, 60%, 70%, 80%, 90%, 95% or greater.

19. The engineered nitroaldolase polypeptide of claim 16, wherein said improved property comprises improved activity on the substrates of trifluoroacetone, compound (1), and nitromethane, compound (2).

20. The engineered nitroaldolase polypeptide of claim 1, wherein said engineered nitroaldolase polypeptide is purified.

21. A composition comprising at least one engineered nitroaldolase polypeptide provided in claim 1.

22. An engineered polynucleotide encoding at least one engineered nitroaldolase polypeptide of claim 1.

23. An engineered polynucleotide sequence encoding at least one engineered polypeptide, wherein said polypeptide sequence comprises at least 80%, 85%, 86%, 87%, 88%, 89%, 90%, 91%, 92%, 93%, 94%, 95%, 96%, 97%, 98%, or 99% sequence identity to SEQ ID NOs: 2, 24, 496, 860, 1120, and/or 1348, wherein the sequence of said polypeptide comprises at least one substitution at one or more positions.

24. The engineered polynucleotide sequence of claim 22, wherein said polynucleotide sequence comprises at least 80%, 85%, 86%, 87%, 88%, 89%, 90%, 91%, 92%, 93%, 94%, 95%, 96%, 97%, 98%, or 99% sequence identity to SEQ ID NOs: 1, 23, 495, 860, 1119, and/or 1347.

25. The engineered polynucleotide sequence of claim 22, wherein said polynucleotide sequence comprises SEQ ID NO: 3, 23, 495, 859, 1119, or 1347.

26. An engineered polynucleotide comprising the odd-numbered sequences set forth in SEQ ID NOs: 3-1483.

27. A vector comprising the engineered polynucleotide of claim 22.

28. The vector of claim 27, further comprising at least one control sequence.

29. A host cell comprising the vector of claim 27.

30. A host cell, wherein said host cell produces at least one engineered nitroaldolase polypeptide of claim 1.

31. A method of producing an engineered nitroaldolase polypeptide in a host cell, comprising culturing the host cell of claim 29, in a culture medium under suitable conditions, such that at least one engineered nitroaldolase polypeptide is produced.

32. The method of claim 31, further comprising the step of recovering said engineered nitroaldolase polypeptide.

33. The method of claim 31, further comprising the step of purifying said at least one engineered nitroaldolase polypeptide.
